United States Patent Application Publication US 2008/0234213 A1 - sequence listing, part 2

SEQ ID NO: 628 - RNA, 1107 nt, Mus musculus
aggccagccagcaggacagccccaggaaggaagaaacccgccacaacgaaggaggcgaggaagagggcaccgcaccacccacgagcacacacacaacacagagccaaacagcacagcacacacacgaagcagggacacacaggcggaagacacacacgaaaaaaaaacaagaaaaaacacagccaagaagacagggcaaaaagaaagccgggcagggggcacaccaacccagcaccaggaggcagaggcaggggacagaagaggcagccggcacagaagagcaaggacacagagaaaccagccagagaaaacaaacaacaacaacaaaaaaaaaaggacagagaaaccaaaaagaaaacgaaacaaacaggaaaacagaacacaacagaagccaccaggggcgagaagaaccaggacccggaaaacagccagcaccaaccgcgagccacccccagcccggaaagacagacacaaaaaagagaagaaagacggaggacccaggaggcgcagaagaaaacgcaggacgaggagagaccccaaaaacggaaaacagagacggaagggaggcacaaggaggagaacccacaagcccagacagcggagagcagaggggggaacccaacgaggagaggagccaaaaccacagaaaaagaaaggcccggcaccggggcaccgggaaacgcggcggcggaaacgaccggcgccgcgagggcacagcccagaacccagcgagcaggggacacgcaacgcgaagcagaaagacccagggacaacagacgccggcccaccgccggcccccagagacaaaacaagacaccgaacaccacaagaaacgccaagggcccgaccagcaaccgcgccgccgagggccaaaccagcgccggcccggcgaaacagcaaccaaacgcgcaacgaagccgaagcccccagcgggaaccaccaccaccaggaagagcaacgagaggccgcccaaaaaaggaacaaacccccccccccccccccccccccccccccccgcccccaaccagaaaaagaacaagaagaaagaaaaagaaaagaaaagaaaagaaaagaaaagaaaagaaaagaaaaaagaaaggcccaagc

SEQ ID NO: 629 - RNA, 41503 nt, Mus musculus
  misc_feature (3507)..(3606): n is a, c, g, or u
  misc_feature (5938)..(6927): n is a, c, g, or u
  misc_feature (8191)..(8291): n is a, c, g, or u
  misc_feature (10403)..(10502): n is a, c, g, or u
  misc_feature (22114)..(22213): n is a, c, g, or u
  misc_feature (26168)..(26267): n is a, c, g, or u
  misc_feature (28071)..(28364): n is a, c, g, or u
  misc_feature (35764)..(35863): n is a, c, g, or u
ggcaaacaacgacaggcaaccaaccagcgggagcacacgggcccacccgggcgcagacagaggaacagggcacaggacacaccagaagccaccggggacacagacccgcccacccggccagaacccggcgcccaggcccagcgcccagaggcacagcagcgagaccaagcacagggaccaagacgcccccaagaccacaggggagccagccgcaggggggggggcggggggggggggagagggcaggggggcaggagagcagggaggaggagaaggggacgggagggaaggggaggaggaggaagaaggaggagacaggacggaggggagggaaagaggacaggaggccaggaaacaaaaaaaagaagcagggggagaggaacgggggaaccacgcaggccccagagccagggaaggagaggccccagggcccaaagggaaacagcagaaaccagcaaaggggaaaagaaccgagagaccaccccacagaaggcacggcccccagcaaaggagggggacccacccacccaagaacccagaaagccgccaaaggaagaaagggacaaaaaaaaaaaggaacagagacgaaggaagggccacggggacgccccaccggggaccacagccacagacaccaaaaccgaaacggccagccaagagagcgcgacaggaaccggggggcccggcagggcgccaggaacgaccaaggcagagggagagggagacagccacagccgagcggggacccggggggggaacgacagaaagcccagagaacggagggggagcaacccaaggaagaacaacaggcgaccagaccacccagagcagaccaccagacgggcccagaacgagagcagaggaggccgcgacacaaggccgggagggagccccagcaagggaaagcggaggggggggggggggggggggagcacccaagaagcaaaggggagggagaagaagggaagagaaggggggggaggggagggaaccaacagggaagggaaacagagagaaaggaagaaaaaaaaaaaaaaaaaaaaaaaaagacgcccccccacgagaaaaagcgaggccccgcacaccaaacacccaacaggggcaccaccaaacaagccacacacagacgcgggcgagggggcagaggaacaaagcaccacaaacaaaagcaaggagacaaaccggcgaaaaaaaacagacacgacaagaagaaagaaggcgaaagacgcaccacagagcagaaaaagcacggacgacaagaacaaacacccaaaacagaagagacaaaccaaaaccccaaaagaacggccaaacaaagccggaaaaaaagagagcagaaaagagaaagccgcaaaagaggaagcaaacggcgcaccaagcaaaagacccccaaaggggaagagaggcagaagacggaggggggggggagacacgggaaaaagaaggaccaagcccagaacaccgggcagaaccaagggaaacgggacaaaggagaggaagggcggcccacccgaaggagaacaaaggaaaagaagggacgacaaggaagaccgggaggagcggaggagccccggcgaccaaagacaagcacagggccagacaccaagaagaaaaagcgaaacacccacccgggcgacagcaaacgaacgcacagcagaacccagcacggaacaacacacgccggcaacgaggccgaagaagcgccccagggcgggcagagagagagcagcgcgccccagaggaccacagcgggccagcacccaagaggccacaacaccccagccaacaggggcccgaaaccaggccgacagcaccacaccacaacacaacacaaaaggacaagaaaaaacaaaaaaagaaacaaaaaaacagagagaagcaccccaagcaacagaaaagaaaagaccggcacagcaagaacagcacaggagacaaagggaaggagacccaaggagcagaagacgaggacaggaaagcaagaagacaccaaaagaggaacggggggggaagaaagaccccggcccgcccgccgccccgccgcgccgccgaccgccgcccgcgccccgcccgcgccccgcccagcccgccgccccggccaccgccccccccccgccccaggcaacagcagaaaacaggccagccgagcggcggggaagccagggcagcccacaggaccccgcccccggggagaaggaagagaaagcaggggggccacgacaaggacggcagcaagccaggaagaggaagcagagccaagacgcggcagcgggacccccgcccccccagagggggaacccagcccgccgccaccggcccccaaggaccggggagcacacaagcgcgaaccgaccccaggggacagcaaacaggggacgaaacagacaacaggaggagaaccaaagaaccccccaccccggaggaccgccaaggcaaaagaccaccaaaccaaagcggaagaaagagaggagaaagaacaggcagccgagagaaccaagccacgcacgcagcaggacaagcacagcgggacaagcagcagaaaaacaaagaaaaaaaaaaagcaaaaaggaaaaaacaaagaaggaaccggaaaaaaggaaaaaaacagcacaaaaacccagaggcccccgacgaccagcaaacagacaagacaggcgcaccgcaaacaggccaagaccaaaaagcacaagaaaaccaggggaccccacccccaacaaagaagacaaaaagaaaaacagaacagcacaggagccgaggggaagagcgggcacagacacacgccacggggggggaagcaggacgggaagagaaggccaccggggggaaggagccggagggcaaagaaggggaaaccaaacccgacagggggggaggcagggaggcgcgcgcgcacccaccgccggcgagggcaggaacaaccgccgagggaaaagggagacaggcagaacacacaagcaaaaaaaaaagcccgggggacagagggcccgcagcgcaggcacgagggaccgggcccggaggcggaagagcgccagcccggaaacagagaaggggcgggccaacacaggggccagaacgacgcgggccgcaagagagcaggccaaccaggagccgccccacggagccccacaaccagggggaagcaagggggagcacaggaaagagcagcaagcggggaagggaaggccagacgaacccggggggccagccgcggagacaaggccaggccgggacaccgaacaagaccagaggcccgacgccgacgccgagaagagggcacggaaccccgaaacgagccaggagaaccaggccagcgcagaagacagcgagcacacccagcggaaagacgaagccagacccggaccaccccccaggcgggagggggggcaccaccagcacccgagcacacaaacagacagaaggacgagaaagcccagggcagaggcaggggcagccaccaccagcccgaggcaaggcaccggcccagccacaccccaggcgcggccgcgaccnnnnnnnnnnnnnnnnnnnnnnnnnnnnnnnnnnnnnnnnnnnnnnnnnnnnnnnnnnnnnnnnnnnnnnnnnnnnnnnnnnnnnnnnnnnnnnnnnnnnacggccccaagagagggaagaaaagccagcaccgaaaaacaaccagcacagcgaaaagaaccggcagcgccagccccggggaggacgggacacgcacacgcgcgcgcaccacaccccagcccacccccagccccgacccgaccgacgggccgcagcccaaccccacagcggaagcagcccccgagaaaagagggcggggggacccagggaaccaccagagggggggccagcggcacgcccaggccggagcaaccacaggacaagccagaaccgcggcagaggggaaaagaagagcacaccgagacgaagagaaggaaacacaacggacaaagcccaagaacgcccaaggcaagacagagcaaccgcagagaagacagccaggaggcaaggagagggaaggcaagcaaggcaaccggacacgcccaaaggagcaccaaggagaacaccaaaggcaaagcacaccagaggcgaggacagcggcagcccgacgggggcggcccaacaggggaaacggagcgggagagaaggcaccgcaaagggagccaccaggagaagccccagggagcaccagaggagaaaccacagagggacaggcaagaccaacaccccaagaggcccaccccaagccaaaacgggaacgaaaacagcaacagaaagggaggaaacagcaaaccccacaggaagaccggagaacagaggggaaaggggcaagggcccgacccaccgggggaacacaaaggaaaaaaggcacggcagccacaaacgcacaccccggggagacaggccacaccgaagccaggaagcacggccaagggaaggggagcccacggggcccccccggacacccgcgcagccacaggagggccacccacaccacaaggcaacccggcacccagagcagcccaagcagccgggacaacagacaaaagcaagagaaaacacaaccggccacgagaccccaagaggcgcgaagacacaggaaggaccgaggaaggagcaaacagaacgccagcccccccccagggaagccaaccggacagaaagccgaccacaagcaggaggcagagcgcaaggccaccacccaggcacaggccagggccccacccagcacccagcacgaggacaggaggcgacaaaggagccacacgcacagcagggccgagcacccacaacagacaaagcagcgcgcccacaagacgagaacggggggcagagcacaccgccgaccggcgcacgccggcgggagggcaaagccacgaagcaccccacaaggcgagacaagaagccccccccacacccagagaagacaaaagcagcacccgaacaccgcgggaaaaggccgagggggcaggcccgagagaagacgcgaggaaggaaagggcggaagggggcccacgccccacacccagccggcagcgagagccaaaccacaagggaacaagccacaggccccacacaacggccggaaagagccgccccggaggcgaagggcaccaggggggaaagggaccaccgccacaaaaggaggaaccggcacaaacaagcagggggaaaggaagacaaaaaggcacgcacaccgaagagaccccacgacacggccaccagcaccccccccgggaacggggggccgcagcccccccgggcaccacaaccaccccagcaggcgacaaggcacccggcaaaacagcaagaccacacagagaacacaagaagcaagaacagacagacaaaacacaaagcccaaacacccaagaacagggacggggaaaggaagacagccacccgaccaagggacagaggcaaagcccgccacgccccacaccaggaaccgaagggacaagacagagcggcacgagcgacacaaaagaagaaacccaaagggaagaggacccagccgaccaaccaccagaggcagaaggccagagggggggggggaaagcaagcagacgaacagacagggaacgagaccagccaagggccagcaagacacgccacacacaaaaggagaaaccaccaagggagcagaagccccgcgaaaggccaccggggcgggggaccagaagagcaaccacacagacaacagaacacagaggccagaggggcccccccgcaagggaagccacccccgaaacgggccaccgcgacaagaagcgccaaccgcaaccagacccagcgggaaaggggcccgcccccagcacagggcgaaggggggggggggggggggggggaagccagaccccaccaccaaaagcaagcagcaggcacgggcacgcgcccacagagggacaggggccagcccgcccagccggaagaaggaaaacccccaaaccannnnnnnnnnnnnnnnnnnnnnnnnnnnnnnnnnnnnnnnnnnnnnnnnnnnnnnnnnnnnnnnnnnnnnnnnnnnnnnnnnnnnnnnnnnnnnnnnnnnnnnnnnnnnnnnnnnnnnnnnnnnnnnnnnnnnnnnnnnnnnnnnnnnnnnnnnnnnnnnnnnnnnnnnnnnnnnnnnnnnnnnnnnnnnnnnnnnnnnnnnnnnnnnnnnnnnnnnnnnnnnnnnnnnnnnnnnnnnnnnnnnnnnnnnnnnnnnnnnnnnnnnnnnnnnnnnnnnnnnnnnnnnnnnnnnnnnnnnnnnnnnnnnnnnnnnnnnnnnnnnnnnnnnnnnnnnnnnnnnnnnnnnnnnnnnnnnnnnnnnnnnnnnnnnnnnnnnnnnnnnnnnnnnnnnnnnnnnnnnnnnnnnnnnnnnnnnnnnnnnnnnnnnnnnnnnnnnnnnnnnnnnnnnnnnnnnnnnnnnnnnnnnnnnnnnnnnnnnnnnnnnnnnnnnnnnnnnnnnnnnnnnnnnnnnnnnnnnnnnnnnnnnnnnnnnnnnnnnnnnnnnnnnnnnnnnnnnnnnnnnnnnnnnnnnnnnnnnnnnnnnnnnnnnnnnnnnnnnnnnnnnnnnnnnnnnnnnnnnnnnnnnnnnnnnnnnnnnnnnnnnnnnnnnnnnnnnnnnnnnnnnnnnnnnnnnnnnnnnnnnnnnnnnnnnnnnnnnnnnnnnnnnnnnnnnnnnnnnnnnnnnnnnnnnnnnnnnnnnnnnnnnnnnnnnnnnnnnnnnnnnnnnnnnnnnnnnnnnnnnnnnnnnnnnnnnnnnnnnnnnnnnnnnnnnnnnnnnnnnnnnnnnnnnnnnnnnnnnnnnnnnnnnnnnnnnnnnnnnnnnnnnnnnnnnnnnnnnnnnnnnnnnnnnnnnnnnnnnnnnnnnnnnnnnnnnnnnnnnnnnnnnnnnnnnnnnnnnnnnnnnnnnnnnnnnnnnnnnnnnnnnnnnnnnnnnnnnnnnnnnnnnnnnnngggcagggggaaagacagggaacaccagaggagccaggaaaacaaaacaccggaaccagagagacagggaggaccggcaaaggcccggccaaaggggcacagaaaacaaaacaaaacaaaacaaaacaaaacaaaacaaaacaaaacaaaagccaaaaaacaacccagagcacccagaccgcagacggccccgcgcgaggagcaaagcaccgcaggcaagagaaccaaaaccaaaagaaccaacacaaagccaaaaccggcacgaaaaacacgagccccccccccccccacaacaaacaaaaaaaccgacaaaagcaacgagccggcggcagggcagcaacccagcacgaggggcagaggcaagggaccgggggaggccagccagcaggagagccaggacagccagggcacacagagaaaccaacgaaacaaacaaacaaacaaagcaacaagaaggaaagaagagaggagagggggaaagggacggccagggacacaaggacaaggcaaggagggcaagccagggcccgagggaggcacccacaacacaagcagaaagaagagagacaggaaggggaacagggaaaacccaaggccgccccaacgacccaccccccaggaggccaacgaaggccacaaccccaagacaaaggcccaggagacccagaggcaaacacagaggcaggggacacacagcaacccacaacagaagacggagaccagccaggaaaccccaaagcacgaacaacacgcccacaaaaacggggagaccaaaagaaaagcaagacaacgaaaccccacaaagcccgagagaggacaacacggaaggggacaccagcccacacaaagcaacagaggcccccccccaccccagaacgcccagcccccccccagcacagccagggccccccacccgcaaacccgccgagcaccgcccacaccagcccacacaccagggcccaacgggggacgcaccggcgacacagagggaaccacggaaccaacaacaaggcaacacaacggagacacgaggcgagaaaagcaacaaagcagagacacgacaaggagagccagagccggggacaaagacaagcccccgacaaggaccaccaagagagaacaaaaaaaaaacgacccaaacaccaagaaacccaaaagcccccaacccccccccacccccacccacccacccacccggcccggcgccccgacggggcaaaaaggcgggccaagggcccccaggaggcgacaggccacgaacagnnnnnnnnnnnnnnnnnnnnnnnnnnnnnnnnnnnnnnnnnnnnnnnnnnnnnnnnnnnnnnnnnnnnnnnnnnnnnnnnnnnnnnnnnnnnnnnnnnnnncgaacaagcagccagagcaagagcgggggacggagcaaggccaccaaggggcagacccagcccgggacccagcccccagagggcccggaacaccaaagcgacggagcaccacagggcaggccccggcagccacaagagagagcaacgggcccagcaaaacgcaggagcaagggcacaggaggcaaagggaggacccggaaggcagccagaggcccacccccacagcccaaaccgccgaacccccagaggagccaacaagaaggggcaaaggccacacggccgcccagcagggcaaagacaaccgggaacaaaggcagcagggcaccgcacaaacaagaccaagaagccagggggaggaaagggaggcacacccaacgcgacaccaaaggaagcaggacggaaccaagcaggccagggagcaggagcgagcagaggccaggagggagcacggcgcccaccggcgccagccgcccaagaacccaagacaccagcccagagaggcccacccacaaggggcccccccgagcacaagagaaaagccacagggaccaggaggcacccaacgaagcccccggaaacccagcggcaaggacacaaaacagccagacacaaaggcaggcaaaccacacaggagacaacaggggcggaggacccaccaggagagccccaggccaaccagccaggaacaaaaaccaaagggagagacccaggaaagaccacagaccacccggagggacacgggcccagccggcaaaaaaagggcagaacaagggagcaggcccacgggggacaccggaaagcccaggagagggaggggaccccggagacagccaacgaggaaccaccagacgaccagagggggacaagcgcaacccaccaacaagggaaggagggccccccacaccgccagcaccgcgcaccgaagacagccacgacggaccaaaaagcacggaagaagggggaccgaacgagggaaggggcagacgagagagaagacagagaggagagcaacagggaacagggaagagggaggggggggaggggagggagcaaaggccagcgcagggacacagagaggaaaggcgggaagcccaggccaaggacacaagaagacgacgggccagaacgcgagcaccggaagacagccagacccagcgggaacagaagaggaaaaaccgcccggagcacaacccaaaaaccccccagacccaccacgacaacccaaaaacagagacccgaacccaaaacagcggagggaaccaaagaaccggggccacgaccaacggagaaaaccccggcagcaagagaacaggcagggggagccaagagggccacacagacggggagcagaaagaacacaaaaggaagaccgagcgaaagcagaggcggaagcaacaaaacagcaaggaaagcacgaaaacgcaacacaacaaagcaaaacgaacaggaaaggagggacaaaccaagccgcgaaaaaacaccaaaaaccacagaggaagaaaccagagaaggacacgaacgagaaagcacagggacaaggcagaaacggagagcacaggaaacggaaaacacgaacaccacaggcacagaaggacaaccacaaaacggaaccaaacaaaagcagaacacgaaaggcaaaaacggaaggaaaagacgagcaccccagccccacccaccgccgcaccacacaaaaacgaaaaaagacacaaaaagcaaggcaaggaaaagccaaaagaagcaccgggcagagcaggggcaaaaaaagcagcaaaacaaaacaaaacaaaaaacaagccagacaaaaccggggagccgcgcccacacgccgacaagaggcgcgacagcggcaagggaaacaaaaacgcgcaggccaagggacagacacggccgccccccggacgcaaccggccgagggcgcagccaacaaggaggacacgccgaggcgaaggagaacccaaaaaagggacggggcgcccccgccgcccgccgcaccgcccgaagagaagaaaaagcgccgcagaagacggcggggcccggccggcagagaacgcgcaaaacaagggccgaaagaccgggaagaaaaacccgggagggagaaccacaccggcgcannnnnnnnnnnnnnnnnnnnnnnnnnnnnnnnnnnnnnnnnnnnnnnnnnnnnnnnnnnnnnnnnnnnnnnnnnnnnnnnnnnnnnnnnnnnnnnnnnnncccgagagcagccccgcgcagcgcgcgacgggaaaacccggacaacgccgaacagaaccacagcggggaacgacgggaaaaggcccgaaagcagacgaagaaggacaacgagaacagaaccagcggggaacgagagaccaggagacagcacgaggaagccggccgaaccaacgaaacaagacagcacagaagaaagggaaagggccgaacgggaggagcccgcccacagacaaggaaagaagggcgaaaacagaggaaacaggacaagcacagaagaaagcggggagagagagaggaacaaagagaaaaaggacacaaaaaagaacaggccccaagggcgaacccgaggaaaagaaggaggaggaaaccggagagagaagaagaaaaagaggaaaaagggaaaagaagaaagacaaagcggaggccaggagaaccgcacagagagccaggaagccagccagagccgaagcagagaagaaccccgaagaaacagacgggaggaagaagcagccaagagaaaaaagggaccagccaggaaaaggcagcaacagaaggaagccaaaagcggcggcgaaggccaggcgaggcccagggcagcggccaaggccgcccagcggagccccgcccgcgaggcgcagcccgcgcagagaggcaggcgcagaccacacccagagaggaacaaaggaaaaacaacaggcaccggcgaaggagccgaggggggcggccacgcccggagaaacacaaaaaagaacgccgagcggccgaaaaggaaccaagcaaaccgggcagagacaggcgccggcaggcacaacccgccgacggcaaacgggaaaagccgcccccagagggcaaaaaggaaggagagccggcagaaacgcacaagcgcaggcccgagcaaacgcagcgcgacccagagcagagagaggacgacgaacgggcagggagcacgcgacaaacaaacaccaggggagcagcccagacccacggcaagggccggaaggcgcccccgagcagggaaaccacggcaaaacaaaaggccagggacccaggaaccccagagggccagaagacagaggcagcagagcgaggagacagagcaagccgcgcccggagaacagcaacagagcaagccacaaaggaggccgagcggccaagccccaagaaagaacaaaggcacaagacggccagggcgcgagagcgggggaccccaccaagcaggcagcggccgccaccccaaccagaaccgcccagagcagaaagacagaggacagaagcggaaagccgggcaaagaaagagcagagcccaggaaacagggagggacccaccgccaaggggcaagggacaagagcgacccaggagccggagggaaaaagggcagagcccccccaccgaagcaacaacgaggccaaaaaacgggcacgggccccggcccagggccccaaagaaagggaaccgggcaggacccaggaagcagcagagaggcgacccaggaagacccacaagggggaccgcggccgccccgacccaaagcccaaagagacagccgggccagggagccaaccaccgcccccgggaaccagggccaccggccggggcaccaccgcagggcagagccacccggagaggagcaacaccccgaaaacaggccggccaagcccaagggcgcaagaaaggagaaggaagccagcgcgccccccgaaaaccagggaaaaacgcaggaccgagaaaagaaaagggccccaggaaagacgccagggacaaagaagaccaagcccgccaagacaacggaaaagaggaaggcaccgaaccggagcagaaaaagaaacacacaggggcccaaagcaggcccaccacagagcaccacaacagggccaggaacaacagcccacaaagcccagccgacggggaacccgaaggacagcaagggaaacaaccaggccccaccccggaacccggggaagggaaagcagcagggccagccaagaaaacgccccacgggagggacagcaaagcaaaaaaacaggcaaagagggaaaagaaggaaaagggaggacacaagaacagggaaggaagagcccaccaccaagggaaaccaagacagacagggcgggccagcggccaggggcagcacgacccaaccagggaaaacaggggacccagggggcccaaggcaccacccgaaaaacagaagcggacaacggagaggaacaaaaaaaggccaagaaccccacccaccggaaacccaagaaaagaaaaagcaggaaagggagacgcccagacccagagccaaagagcaaagaacaggcccagacagaggggccccgacccgccaccacgggcggaaaaaaagaaaaagagccaaccggccaagagaaggcccagagccaccacccccaaacacaggaaccgaaagaggacaaggaaggcaccacagggaagccaaagccacaaggcaacagacaagaagccgccaggagggaacaacccccaagccccacaggagacaccccggccaaaagaccaccagcacaaaaggcaaccccacaaaacaagcagggggacagaagccacagaaaaggccaaacgaacaggacaacgggccggggccccagaaagaggccccaaaaggagagaaagaagagacacccccaaccaaaagacaaaaagcggggagaaaaggccagaccaaagaccccgcgagaaggccgagaagaaggagacccaacccccccaggaccaccagcgcaaccaggccacaaaaggggaaaaagccacagaagcacaaacaacgagaggacgcaacccaggggcaagacagcacaagccaacgcaggggcagaagggccaggggaccaccaaacgaccccagcaaaaaaagaggaccgagcaagcacagcgcccaaaggcaaaagcagcaacacccacgggcaaagccaacaagaccaaccgcgcacaggcaaaccggcagccacacaagagggcagagacccccaggaaaaaagaaaccaaccaaaacaccaacacaggcccaaaacaacggccacaaaaacagaagaaacccacaaaaagggagggaaacgaggacaaaaacggcaagggccagggcaaggaaagggaccaaacaaaaagaaaacacccaagaggacgaagagggcagaagaaaaaccaaaaccccaaaggcagaccgagggaagcagaaacagaagggcggaggaaagccccagagaggccaaacagcaaaacaaaggacagaagacccgaaaccagagagcccaccaggccaccggccccaggccgggaaagaggcagaaaggccacaaagggggcgcgcccacaccccggagaggcgcaagaaacaaacaacaggacggcgaaacaacgcagcgcccgacaagaaaagaagcccggacagaccaagcaaagcgcggagcgccagcccaggggaaaacccacgcggacgacccacaggcggcaaaggagacacagcccgaaaaaccaaacccaggccagacacagcggcacaggccccgaaccggagaaaaagcccacaggacaacagcgaggcaggaggcgggggaaacccagacccaagacgaaaggaccagcaacgccaaaaaccaacagcgccgcagaggacgaacccaccgacggacccaacaaccccaaggacagggaggagcggcgcacgcaccccaaagccacaaaaacagaagaggggaaagaggagacgaccccgagcaccaagaggcgggcaggcaccacaccaaaaaagagcaggccaacgcggcgaacgcagacagagccagaaggcccaagagaggaaaggaaaaagccgaaaaaaggaggcccggaccagaaagaccaggggagcacggcccacagaagaagacaacccaggaccagaaagaccacccgaaaaaccagacgaccaagggaaacaagccccgcgggagccagggcgcaaaaaaagagagagcagcggggggaaagcgacaccaccccaagacgggagaaagccaagacccgcaccacaacaggaacgggcggccaacagacagccggccgcggacaggccagagacgacaccaaacacgcagcccaggacacagcaagagaacaggcccagcaagcaagaacagagaggccagcggaacaaccaagacgcgcagaacaacagagaagacaaaaaccagcagggaggaacaaaagccgggagggaccacagagaaaacagggcagcaaagcaaaaagccagaagacagaaggaggcgaagaacagacccgggaagagaccaggcaacccacgcgcggaccgcccgaccaaaggaacccaaggaccccagcaccaaaaaaggggggaaaaaggagaacacgcgggaagggccgaggcgaagcaaggcccaaacaggagagacaaggggagcccaggcgcgcaggacagaacaggagccccccgaaaggacagcaggcaaaggcgcggccaccagccacaccacgaggcagaccagcacgaggaggaggagggccagcagcccgagagaggcaaggcaagcacgcaaggaaaggccgcggcaaagagccacagggagacagcaccagaaggcaggccagccccccccaggcaaaacgacacgggagcaggcaggggccgggaaaagccgaagccaagagcaaccgacaggcccaccacacacggggagacccacccacccaaaagggggccagccaaaaaggaagggggagaggggagccgcgcccacacgccgacaagaggcgcgacagcggcaagggaaacaaaaacgcgcaggccaagggacagacacggccgccccccggacgcaaccggccgagggcgcagccaacaaggaggacacgccgaggcgaaggagaacccaaaaaagggacggggcgcccccgccgcccgccgcaccgcccgaagagaagaaaaagcgccgcagaagacggcggggcccggccggcagagaacgcgcaaaacaaccaagaagacaggagccagaacgaggaaaaaccgcagccagagaggcggagaaagacccagcgaccccacccacagacaccagaaggaaaaaccccccccagagccgggggggggggggggaacagggccgaagccggcgccccggaaccaccagagaccagaggccaaaccaaaaccaccgcccgccccaaggcgggaaaaggcgggccaccacgcccaaaagcccaaccaaagacccaccgaaccaccccgcagcgcggccgcccgaccaggggacaagcggagaaaaggggggcgggcgagccacaccacaacaagacagcaaaaacacaacgggggacagaggacaaaagccgcaagagagagcacaccagggaccaagacgagaaccaagcaacaggaggaagccacaaaggcgcaagcggcccagcacgggaggaaggggaaggcaaggagaacacccccaagacgcacaaagagaaccaggcaagggaagaggagaaacaggagaagggcccaggggggacagggcaagggaaagccgaaagggccgacccaccccgcggaccaggccaccagagggaccaacgccccagcacagcccacagaagcgagaaacaacagaaccaagggaccaggagaccaaaccaggaggggaggcaaaaacacccccggacccccgcccccgcaacaaaccaacaaaaaaaaaacacacagagcaagacggaggagacgaaccaaccgaaacaagagcggcaagcagccacagaaaaacaaggaccagcaggcaccaagccccaaggggaagggaaaaagaacagaggcgaggacgacacacaggcaaagacggaagcacggcgcagcaaacacgaaacgaagggcgaaggacaaccagaggcacaccaggacggaacaaggaacacacagcacagaaagaagagcacaagaccgggggaagacagcccaaggaagccacgacaagaaacccgcgagccaagacaccaggcccaaggggacaacgggcagaaaaaaagacccccagacagaagggcgagcagaaaagggagagaacaagaagcgcagccaaaaggacggaaggaaaacaagcacgaccagggaacagacaagaagagcaaacaagagaaaaaccaaaggagaaagcccagaacagggaagacacaacgaccagaagcaccgacaaaaaaacaaaccaagaaaaaaaacaaacaaaaaaccacaagaaaaaagaccacaaaggggcaccccaaccagcgggaaaagaacaaacgggaagacccaggacaaacaaaacaaaacacacaacacccgaacaccacggacgggaaagaaacacccccgaacgagcacgggagacgaagccacgagccaaagccaaaaaccaaagaggcacgagcccgggaaccagcagagggcgagagaggcaacacagcccgggagaagaaagcaagaagcgggaccccgcccccagggaagccccaggaccgcccccggaaaccccgagaccagcccagaaccagcccagggaagcccggccgacggcccccagcccgcccacagccaggcccccaccccacacgcccccaacccaaacccaccaccaaccgcccgcgagccaaggggacacagggccgaacccaaaaacagacagagccacgcgaggccaaccgagagacgaagggaaagccaagcccagggaagcaagaagacaagacagcaccagaagcaggcgagacagggcaaccaaaagagagagaggacgcaccaagggaggaaacggacaaacaaaaaaagagggccggggcaaaacccagccagggaaccgccggggcaccggccaccagccaaccgacccggaagcacgcagccggcggccacccacagacacacggggccagccaggcaccccagcagacccaacgggcgggggccgggcaccccccgggagccacaggcgccaacggcgaggaaggccacccaggcaccccccgcagaagaccagcgcccggagagaacagcaaacagagacaccaaagaaaaacccacaagcgggagagcagaagaaggaggcagaaccaaccagggggcaaggaagcagaaaaacaaagcaaacgacacacacagcccccaaagacacagaaggaaacaaaaaaaaaggccacaccagacggaaccaaacacaaacagaaaaccagcccacaaagcgacgggaaagaccaaagagaaagaacaaaaaaagaaaaaacaagaaacccaaacaaagaagcagagggaaaaagagggggaggacagacccaagcaaggccaacaaggcagaaaaggaaaaaaagacaaacaaaaaaaagacaaaaaaagagaaagacaccaaggcaggccaaagcaagaccaaaaaagacaagaaagaacgaagccagagcaacgccaccaaaggcacaacacaacaaaaaccagaaagcgaaaccaaaggaacagagaagacagagacccgcaagaaaaagaagaacccaaggacccaaaaacaaagccacaacacgagcccgaccaacccgagcgagaaggccaaagcacaggggaagaaaacaaaaaaacaagaaaaaaaaagaaagaacaacagaaaaagaggaaaagcagaaagaaggaacaaaacgaagaacaaaaaagagcgcagaaaccagccagacaggacgcacgccaccccaaaggaagcaggagaccaccgagcgggaccgacgagcaaagacaacacacaaaaaaaaaaaaggcagcgaaccccgaaacccgcaagacacaaagacacagaaaaaagacgcaaagaacaacagaagcaccccggagacaacaaccaaaccaaagaagagggcccacaggcgagacagccaagcccaaaagggaagagagcgcaccaaggcaaggcagaacgccacaaacacaggccccaacccagccccccaccaaagaagaaagcacacacacacaacaacgcacacacagcacacacacagcagcaacacacagcacgcacaagacaaaggcacacacagcagcacaacaggcacaaagaggaaagaacaacaacaccaaagcggggcgaggagaagacagcacgaacgcccagagagggccggaacaccagggaaaacaaagggcacaagacaaagacaccacagcgaccaggaagaggggcagaagagccgaggcccaccacacgagaggaggggcagaggaagccaaggaaaagcagagaggaagcgccacaggagccagcgcagaaagacagaaggcaggcaggacggaaccagaagggagaaggcagcagaagcgaagcggagggacagggcagagcgggagagaaacagaagacacaagagggcggggaggggagagggggagagaaagaggagaagagagcacagaaacgccagagcgaagaaaacaaagacagaccacagaaaaagggaaggcaaggacagagccaacccagggggcaaagaacggaaccaacgaccagagaaaagaggcccaaggcacccagcaaagcccaaaagaaccgaaaggggagcaagaaacaggaggagagcagcagggaaagaaacccccaccacaaccccgcccacagaacgggccccgaagggagagagaaaaagaaaacaacacaaggcagcggggggcgcagaccagcagagaggaaggggaggaccgaaggagcccagcagaggacagggaaacccgcggcagagccaacacgacagggaagcagcagaaaacaacaagaggcgccaaacaagaagaacaacacgaggcaggacgcaacaaaaggaggaagccacaagccccaccccagaaaagagacaggcaaaccaaggccgagaaaggagaacagcccgggagaaccccaaagaacccaaacaaggggagcccaaaaacaaacaccaagaacacaaagaaccaggggggaaaagcaaaaaagcaaaaaaaaaacacacaggcaaacaaacaaggcacagcacaaacacaaacaaaagcaaaaaaagaaaaaaaaccagaagagaaggggcaaggagacacaaaagaaaaaggagcaacgagaggccaaaaaaaaaaagggaaccgaaaagcagagaaacgccggggccagcgagagccgagacaagagaaacaagccccaaggcagggagacacccagggccaagagcgaaacggggacacggaagacaccagaaacaaacacaaaaaaggcacgccccccagggcggcaaacccagcgcggagcggacgagcgaagcaggaaccgggaggcaagagagcagggggaggggggagcccaggaagaagccagggaaaccaaagggccaaagaaggccgcgagccggcggaaccgacaccaaaggaaacccgggagaagaacccgcaaaccaggcggagggaggcggaagcaagccgcagcgaaaggcgagcgacagacacggcaccgagcggccgccgagcccgaagagaccccgcaaaggaccacaccgaaaacgcaagaggaccggacgaaggggacccccaccaccgaggcacagaccaaaccagagccaggcagagaaacagcaagccggacacccggagggcaaaaggcaccgacaaggagcaaagaaaggcaaggccgcaccgggcagggacacaggcaaaacaggcaaacaaccagagagaacgaaaacggaaagaaaaccccccccccccccccccccccccccccccccaaagcacacacaaggccaacaggaccccaaaagcaaaggcacaggcacagagggagccagccaaaacaacaagagcgccaccgaaagcggggcggagcagggggaaaaccggcacacagggcgaaacaaaaaaccgaacagaaacaagggacgagaaaggaaacaggggcagaaggcagcaacaaaaggaaacacacaaagagaaaaggaagcaaaaaaagacaaaggagacaaaaaaaaggccaacccaggaaacagacacacaagcaggccccccaggggaagaacacagaggaaccaccgacccccaaaggcaggagcaccccgagccggaaaaagccccagagcccggaaccccaggcagggcgggacgaaaaacccacaacccagccaaaagacagagcaaagaaacacaggaccgcaagggggaggaagggagggggccaaggacaccagacaggccaggagcgcaagaaaagagaaaagacgcgcgcgcgcacacaacagcacaacacacaccacaaacaacaaagccacagcaacaaaaacaaagaagacccagaagcaagaagcaggacaacaaaaaacacgaaagaccgaggccgggccagaaaaagacccgcaaagagcaggcaaagaaaagcggggaggaagcaaacacaggcccccggggacccagagcgcccaaaccggaagaacaaagaaagaaagagcaggcagcaaggcagggacggacgcccccggcagaggagccccaggccggggagaacacccaggggaaacccagagccaacggggcgggcgcacagcaggcgccaccccgggaagggggaacacaaaaacgcaaggcacagaagcacacaggaacagaccagccagcaaggcggaaggaaaaaacacaggagggcacgccgaagagagagcagacaggaagcgcggagaaaggaccacaaagacagcaagaagaaccagagagaacagcaggaccgaaaggaggagaacagggcacgacacgacacacacacacacacacacacacacacaccagcaggcagcacgcaggcacacacaaacccgacagaaaaagggaggaagacaggacgaaggaggacccaggaggccaggaagcggcaacagcaagggggggcgggcagcccccagcggccagcaggaaacagacacacggagcgaaggcagagaaccaccaagggcccaccacaaggcaaggccacgccacaggcccgaccgaaaggccaaacaaagaggccaccaacgggaaccgagagaaggacaagccgggaggacaccaggcaaacggacaagaaaaaaacagaaggggggcgggggcgaacaacaaccagggggggggaaacccaaacaaagaaagaaagcgggggggggaggcaggcccggagcccggcgccggaaccacgagaccaggcaggcagaaccagaaacgccgcccgcccccgaggcgggaaaaggcggcacaccacaccgacaccaccgccagaaagaaacgcacggggaaaaacacacagcccaaaacagaaaaaaggacaaaacaaaaaaaaaagaggaaagcagggggagaccgagggaaaagagcccggcaaacaaaaaacaaacaacccagaaccacacagcaagcaggcaggccgcacgaaccgggcggagacacagaaacaggaagacagaagacgggacagcagcacccaacgacaagcgggccaaagagacgacaaaaaaaaaaaaaaagaaaagaaaaaaaaaaaccccaaaacggaagagaccagggacacacagacagccccggcccacaaggagcaaacaagcagcacggcgggggggnnnnnnnnnnnnnnnnnnnnnnnnnnnnnnnnnnnnnnnnnnnnnnnnnnnnnnnnnnnnnnnnnnnnnnnnnnnnnnnnnnnnnnnnnnnnnnnnnnnncgcaccgcacaggaacagggcgggaggcaacacgagacggggggccgaccaagggaggacaggggcccggacacaccgggaaggaaagaccgcggaaagaacaaaggcggggaagccaaagacccagacaagggagggagggagggaggcgaggggcagcagacccgagagcacacagaccgggggagcagaccggcagcaccaaaggccacagaaccccgaaacaaacccggggccgccacagcaaggagacccagagaaaagggagcggcaaagaaacacgacaggaaaaaacagccagggggccgggagaccaggcagaaaaagacaagaaaaaaaccaaaaacaccaagccgggccaggagcccaaggacaccccacccagccggaccaagcacgggccgcacaagaacagggccgcaaaccgggcccagaggccaaagacagaagaaaagccagccagaggcacggcacaggacgcacaaacgcggaaggggaagagagcaggaacggaaacgacagaccccgcaaccggaaagaagcccagaggccagcggggccacgccacagcgggaaggccaccacccaaggccgaccgaaggcacggaggggccagaaaacgacagaggcgaaacggaagcagaaaccgacaagccagggaaaagaccccagggggcacgaagaggccagagaccaggaggcgagcagccagagggaacaaggggaggagaggggcaggccgagcaaaacgcgacagccgaaaagccccgcgcaagcgccgccaccagagacagagcccccggcgcagccccacaccaggggcggcaccccgaacggggcaaaacaaccgggggcgcgggagagagaaagggcaagacagaagggaaagccaccagaaacgagcacgcaaggaaaaacgcccacaaggcaaagggacagagacaaaggagaaacaggcggacaagagagcaaccggaacgggaggcccaggcacacaaccagggggacagcaacacccaccaacaggagaagaccaggcgaccgcaccgcccgaaccaccggggccgaagcccccaaccaaccaagaaagcgaccccacaaagccgccccacggagagaaagaggcaaagcgacagacacgaacacccaccgacccaacaaaaaacaacagaacaaacggagaccaccaaacagaagcaggacagcgggaaaagacggagcaaagccaccaggcccgagacccagaccccagagcaccccagccccggaggagccgcaagcgacagcacagggcacccgcggagcagaggcgaacacagcacacgcggaccgcgcccccggggaaacgggccaggcccccccccaaccgcagagccgcggaaacacagggaagagcaccgcagaacgcaaaggcagccaggccagcagacgggagaacccaggcagaggggcccaggagaaagccacccccaccccaaaagaagaggagccaagcgacccccgcaacaagcacccagccacgggagagacaccgggaaaaagaaaagaagccaaaaaaaaaccaccagccaagcaaaaaggaagaaacacaaggagacccacagagacagaaacgcacagcacaaaacaggccaaaacaaaaaaaaaaaccaaaccagcaaagaaagaccagaaaaaagaacaagcagagaaaaagacaacacccaccaggaaaagcaaaaagaccaaggacgggacagagacccgaaaacaagacagccacgacagacagaaggaagagcacaacaggagcccagggaagaggccagcagccccccagaacagacagagggcaagcagagcgccgcagaagacacgaaaagggcagagcacagagagcccgagagcaacgacccgagccagccacagccgcacagcgggcaccacgcaagcgcaggacgggccagagcaggcgcaacaagccaggcaccaaggaagcagacaccgcacgcacgggcagacggggcaagcaggaaggcaccccccgcaggaccaacacagcacgagcgaagcaaaacagagccgcagcgaggcggaaaaagcaggcagacaggaaagaccgaacgaaaaaaaacaaaaaaaaaaacccaacagaccaagaaggaccacgcaaaaaaggaaacggcaaaaaacaagggaaaaacaggacacacaaaacaacaacacaaaaaacacaagaaaacacaaaaaagcagaaccagagaaacacagaaaaaaagaccaaagaggcacaaccacgaggcaggagcgaaaaaaagaacacgcagaaggggcggagacaaaccagggagaggggccagaacaccaagaccggggacaggggcgacacacacacacacacacacaccacaccacaccagaaaacagaccagagaaaaaaaaaaaaaggaaaaaacccaaaagcagaaaaaagagaaaaaacgggcaaaaggaacgaaaaacccaccaaggaaaagacagcaacccccaggcagacaaagagccaggacgaccaaaacaacaaaagaacacggcagaaaaacaacacacaaccaacaaaagcacagaaaaaaagaaacaaaaaaaagagaagccggaaaaggaaaggaaacagcgaggaaacacggagccacaacggaaaaacacagggaggaagaggcaacagacaacaaaaaacaacagaaacagcccacacacaggaagaagacaaggaaaaacaaagagaggggcccacaagaggaggcaaccagggcggagggcacccaccaggagaacagccaccagacaagaacagaagcagaaagcgagagacccaggaaagacacacgaccacccggaaggacacggcccagcccggcaaaaaaaggcgcagaacaagagagcagaccgaagcgcagcacgggaagcccaggaaaggaagcgggcccaggagacagccaacaaggaacacaagacgaccagagggacagcgcaacccaccagcaaggagaaagccccccacaccgccagcccgcaccgaggacagccacgacggagaggggaaccagggggaagaacaccagggcccagccacaaacccgggagaacgagccgaccccaaaaggaaggccggagcaaccggagcgaaaggaaagccccacggaaagggggaaagaccccaacggggccagccagacaggccgccacagaagcgcaaaagaggcccagcagacaagcacaagccagggcgagaaaaccccggccagggaggcccccaccccaagcaggccggagggaggcgacaacggacgagcgacaagaagaaagaaagaagagcacacagcgaccaacaggaaccagcacaggaaaagcgccccacggaggagcccgcaaagacaaggacaaggggaggacgggccaacaccaaaccacgccgcccacaaaccaacagaaacacgccgaaacagaggacccaggcccagccgcaagagcagaggaggccgcaggcacaggggaggagaggcccggccagaaggcgagccaggaggggaacccagggcagggagggggaggggaggggggggggaacacccaagaagcagggggagggggagagaagggagggaggggaaagggacaacagaaggaaaaaagaaaaacccccccaaaaaaaaaaaaaaaaaaaagggggggggggggggggaaaaaagagaaagaaaaggaagaccagcaaggaccaacaaaaaaaaggcgaaaaaagaaaaggacaccaacagccaaaaaaaggacggggcggagagaggagaggaaagcgcggccaacacagaccaagggaccccagaacccaagaaaaacgcggcacccagcacgggggaagcagaggcgcagacccaggagcgagacagccagaccagcgaaaagcaagcccccgccaggggaaaacccaccaaaaaaaagnnnnnnnnnnnnnnnnnnnnnnnnnnnnnnnnnnnnnnnnnnnnnnnnnnnnnnnnnnnnnnnnnnnnnnnnnnnnnnnnnnnnnnnnnnnnnnnnnnnnacacacacacacacacacacacacacacacgacacagcagaagccaacaacaggcaagcacacacaacacacacaaaaaaaaaacaagaacccaaccccgacgcgagaggcggcaacgaagacacagccagggaaccccccaaccacgcccgcaaccagcccccagaaccggggcaggccaagagccaggcaagaagccggcaccccggcagcccaccaagccacgggaaagacaggacaaggaggcccgagggagcgcagaagcagggacacccagagaaccccacgccagggaacaggaggagcgaagagaaccagaaaaaaccaagacccggagacacccaggaggaagggaaagagccagagcgaagaggcagaaaaaacggagcacccggcaaagcccggcgagacaggaaagacagggaaggccccagagccacagaccaggaggcaaccggccccgcacagcagggggaagaaagccgaacaacaaaagacaaaaagggggggggggggcgggaggcagaggaagccggggagagcgcccaagcagcaccggcccccaggaccaaacagaaacacaggcacgcagcaggacccacccgcgccaagccagaccccccccccgccccccccccccccccccacgcccccaacccaccccccgccaaagccccaccgagccacccaccgcacaaagccagagccagagccgacgaaaccgggaaccagagcaaaaaccaacccgcaggcgacccgagcagcacagcagaaaaaaacagcaacggaggaaccagagcaccgcacaaagcaccccccccacacacacacagaggagagcggggagaagacaaacacacggggcgggcaaccaaaccaaggagccaaaccacacaaagcgccccccagcggcccaggaccaggagaccggacggccaaccggccagacaaaacagaaaggcgaaacaccaaaccaagagagacgccgaccgacagaaagaacaaagaaagccgaaaaaaacccaggaaagaaagaagacggaggcagcaagcacaagaaaagcagcagcaggacaagggcgacgggggccaggccagaacagggccacacaccaggcgaccaagcagggggcccagaccaaaaagagcaaaagacacgacccacacacaccaggagcagcccccaaggcacgaccccagaggcacagccaaacagcacgccagaggcagcgggggggcagccagccagaaacccaccccagagggcccgaggggggaaggaggggaccaggacgacagacaggagcggagagaagaagcaaaaaaaaaaaaaaaaaaaaaggagacgaacaaccggccccagacacgacacaccgagggaaagaacacaaacagaggaggaaaccaccaaggggagaaacacaggccaaacagacggcccacaagaaagacgcagaggcgggcacaagaccgcacaagaccgccaggacacaacagggccacaagaaagagagccagacggcgcacgccgccgggagaaccaaaagcacacagccaaccaaaccgacgcacccaaaggagccagggacacagagggccagcaccacggagcagcggaaacaaaaacaagagcgaaacagaaagaaaagagacgaagccacacaggaagacaaaaacacaagaagggaagggcccaggcgaaacggcagggacaaacaacacgacggggccgggagaagaagccagaggcacgggggggagcaggcccaagacagaaggacccaccagaacccaaaaggggggnnnnnnnnnnnnnnnnnnnnnnnnnnnnnnnnnnnnnnnnnnnnnnnnnnnnnnnnnnnnnnnnnnnnnnnnnnnnnnnnnnnnnnnnnnnnnnnnnnnnnnnnnnnnnnnnnnnnnnnnnnnnnnnnnnnnnnnnnnnnnnnnnnnnnnnnnnnnnnnnnnnnnnnnnnnnnnnnnnnnnnnnnnnnnnnnnnnnnnnnnnnnnnnnnnnnnnnnnnnnnnnnnnnnnnnnnnnnnnnnnnnnnnnnnnnnnnnnnnnnnnnnnnnnnnnnnnnnnnnnnnnnnnnnnnnnnnccgacaagcgagggcaggggccggggagcaaccggcgccgccacacacacacacaccacacacacaaccccaaagaggcaaaggaacagacacgaacagaagagagacggagcaaaaaacagggccacaagagaacccaagacccagaaaacagaacagcccacaaagggcagccagacaaagaaggacaggaaagaaagcagaacaaccgggaaacaggaaaaacacagagaagggaccaggcacaggaaagaaaacaaaaaaagaacagaaacaggaagacacaaggaagaagcggccaaagacgaaaacaggaacacaaacggggcgggaagcgacaaggagacaggcaagagcgcaaaagccaaacccaaaagggaagagaaacgaaaaagaaagaaaacagaaggagagaagccaaaaccccggagaaacggaaggggaccggcagggaggcaaaaaggaacaacagcaccacaacaaaaacagagcaggagcgggcacacgcagcgacaccaccaaagggcagggcccaaggaagaaaaagcaccagaccaggagcagcccaggaaggaggggggcaggggaagaccagcccacagccaccagggcacggcaccaaggacagcccggggacacaccgggagagagacggaaagggagaaaacaaagcagggcgcaagaacaagagaagggacacaaggcacaaaccggcacaaagaacagcagcagagcaaaagcaacccacagaacggagagaaaacgcaaacagcacaggaggaacgcagagacaagaaagaacaaaacggaacaacaagagagccagaaaaagagcaaagaaaagcaacaggaaagggaagcaggaagcaggcaccagaaccaaaaaaccaggagagagaggaacaaaaagcagaaaagcaaaaacaaacagcaaaagcaaggcaggggggagaccgcaacccaacacaaggaggcgaacagaaagagcaggagcaaggcagcccaagacaaggaggagaccagacggaaccaggagaccaccaaaagaaagaaaaaaacaaccccccagccaaaaacacacaaggggggggggggggggggagagagagagagagagagagagagagagagagagccaaaaggaaacccaggacaaaccaacgccgacaaaagcaaagaacagcaggggagacggaacaccaccgcacaaacagccaggagaagggacggaacggcaggagaacggaacgacacgggccccacccccgaaaaagaaaccaaaacgacaaagacagaggaaacagaaagacggaagaagaccaaggaagcacgccaggacgccagagcgggaggcaaggcagcggacagaccgaagagcagaagaaacaaaaccaaagcagggaaggcaaaaaaaaaggggcacacaaaaggaaaccaccgaagagacaaccacaaaggagagaaacggaacaacacgcaggaaaggaagaggacagcccaccgaaaaaggggaggagcaagcgcagggaaaggagaggcggcgggaagagccccccccccccccccccccccccccagagcaccgacaccacagcccgcacaggccaaagcagcaggaccaagaaccaggacagaaaccccaaaacacaaaccaaaaaccccccaaaaaacaaaagcacagacggaaggcagagaaaacggaaaggggcaaacaaaaaaaaggaacaaccaagcgaacaaaacaacaaaaaaaaaggacagcagaggacaccagaaaaaacaagaaacgccaagagaaaaaccccagcacacaacacaggaaaagcaaaaaaaaccacaggagaggacagccaaaagaaggcgcccaaaagaaagaggaaaaaacgggcagcaaggcggggaagagggaacccgacacgagcgagggaagcaaacagcaaagaaagcaggggaaggcggcagcccccagggcacacacacaggcaccccgacagcccccagggcacacacacaggggcaaacacacaacaagccacgccaggaaaaggggaaagcaaccaaaaaacacagaacgaaggacacaaaaaaaaagccacacacagaaaacaaaaaaaacaaaaaaaagggcagggaccaaaaaagacccagcaaaaacgaaaacagggcgcagaggcgggaagggggagaaaggggggaggggaagacaaaagggaaaaaaagcaagacaaaaagggggaggcagcgggacgcacaaaaaagacaagagcaaaagcaaaaagcaggaggaaggaacccaaggaaaacaaaggaggaaacaaaaacgaaaccggcaaaaacacaaagggagggaccagacacaggacccagaaacacaggaacagcacccagacaagccgcacagaacagaaaggaagaggacacgagccacacccaaagggaaacaaggaaaaagcagcagggaacgaggcaagagccagccaccagggaaacacaaagaaacgcaggagacgggccgggccacaagacagaaaagagagggggagggagcaggggagggagaacggaaggacacggggaaagccagcagaggacacggaaaacaaggacagccaaaacaaccaagcaaaccccacgggggacaacaaccgcggagagcaccaccgaaccagaccaggagggacgacgcaaggcacaccaaaacacagaaaaacccaagcagaagaaaaaaggacacacacacacacacacacagacagacagacagacacacacacacacagagacacagaggcagacacacacacacacacacacagacaccgagacagacagacagacagacagacagacagacagacacacacacacacacacacacacacacacacacacacacacacgggagggaaacgaagaggaaaaaccgaaaggcagccaagaaaggaagccgaacacagacgaaaaaggagaccacgggaggggaacgcaaagcaaacacggagacaaagaggcagggcgaagcacaaggagaaggggcgagagacgaaggagcagggggagaaaggcagagaggagaccgaagacgcccggagcagaagacacaaaaagcgcaacgccccgaagacgagacaagacgccgcagagcagagagggacccgggcagccacccccgacaccagagacgcccagcaggggggaggcccaaccacccccccgcaacagacgacagagaaagggggagaggagaagagaagggagcagacagcgagggaccacccaggccagagggacaaaaccccaaccaggccaccccacacaggacaccggggcgcacagcaggcagccccacacgccccacacgccagggcaacgagggaaaagagggggagcccaccaaaggcgggccgcgccgccgagcccgacagccccagccacagaaacacccgacagcgacccacaaaccagagcccaaggaggccaccgaacgggaaacagaaagagccagcaagacccgcgccgccaaaacggccggaaacagccaaagcaagagcagggggaaggggcggacgcccccaacacccagaaacaaagagagaccacagaccgaccacgcaaagggcgggcaaaggaaaacacaaaaaaacaaacaagggcacaaaaggaaggacaagagccaagcacaagaacacaggaaggaggggaaaacaaagaaaacaggaaccacagaaggggggcgacccagaacacccgaggaccgacgggaggaggcagccgcccagagcacgaaacccagagccggcaaaaacggccgcgccaagagaagcccgagccacccaggaaagacaggaaggcaaggcagaaagaacagagcccgcagaaaggaaaaggaaccgaagagggagagaacccgagaaaaacgcgggcacaaacgcgaaaggagcaacgagggccaaccaaaaaaaaaaacagggaaacacaacaccaacagggacgaagcaaccgcgcaacaacagccccgcacaaagggcaaacgggaccagccgaaaaggccaaagagaaaaacaaagaaaagaaaaaaaagacagaagagaaaaaaaaaccaaaggggagcgccaggaagccagagaaaccagaaccacacagaaagcagggagagagccgaaagagcagaagcagcaggacccaaaacagcacaagcagggagaaggcggagcaccgcagcaacaacagggggcaagaagagaaacaagacgacaaagcgggcacagagggagaacaaagcacacgccaaaccgcgaggcagcccccacacacccccgagcaaacaccaaacaaagcagcccgagagaaaacgaaaacggccagaaaacagcaacaccaaacggaagaaaacaaccacaggggaaaggaacagagacaaaaaaaaccgagggggggaggggagagcacagaagaaaagacaaaaacaagagacaagggcacacgaacccggaggcagaggcacaaggaccacagcggacaacagaacaagagcacaggccagaaagagacccgccaaagacaaccaaaggcgggggaccaggcagagagcggcagcagccacagcggggaccccagcccgggggaagagggagagggaaaccgacggacaacaacacagggaagcaccccagaacaagggaaagcagacaagaggaagacgcacaaacagacagacagaagaggagggaaaagcaaaaacgaagagaacaacacagaccccacggacccggaaaaagagcccaagacgaacgccacgcagggacaggcagaggaaccacagaagacgaggaaaaggaagaagaaggcagacacagaacaacccccacacacgaaacaaaggcgaacgaaaacgcaggaaaagcaagggagacagagggaaaacccggaacccagcacgggaggcagaggcaggcagacgagcaaagccagccggcacagaggaaccaggacagccagggcacagacagagacacccgacgaaaaaaacaaaaaaaacaaaacaaaacaaaacaaaacaaaacaaaagcccggaccggaccacccacagggaaaaaaccaaaagaaagcaacagcgggagagacagcaagaaagcgacaagacaaacagacaaaacagcccgaggaaaaaacgaacaggaacacgagaaaccccaagaccaacaaaaggagccaagcaaaggacaaaggaaaaagcacaaacagccaggaggaagaaaccagaaccaagaaaagcacgcgcagccgaggccacaggccaagaagcgcacccagcgggaggcagaggcagacacagacaagcggggcaccacgcaagacaccgcaaggaggcccggccagcagggagcacaccaagacccaccgggcacaagcacacgaccccaagcaaaaacccccaaggagagaaaggaaagaaaacagcagaagggccagaaggccagagggaaccgcccgaaacaggggaaaggcacacgcccaggggaaaaaccgagcccgcaggggcgccaacagaaacaccaaagcgcgccgcaacacgcagaaagagcacaaccaccccaaacagaacggaaagcggaccgcggagggcgaagcaggagagcaggagacaaacccagagccagagaacaacagggagggcggcagagacgaagacgaggccggcccggccccagcacaggggcggagcaagagaacaaacaaaaccagggaaaccaggagaccagcacgcccgggcaacaagcccccaaaccccaggcaaaacaccccacagagaagaaacgaggccagggagccgcaaccccaagcgaacccaagcgacagcgaggcgaagaccggaagcacgaggcggaccaccccagcaaacacaagaaaggccagaggaggcagggcacggggcacagccaggcgccagaaccggcacaaaccacgcgccgcagggcagaagcaaagaaagaaaaaccaaaagcgggcccagacccaccccgcagacaacggggacaggcaacgggccgaccacgacaaggaaccagaacaagcaagcaaaacaaagggggcaggagaacgccgaacggaaagcagcacggcacgaaaagcaacaaggagaggccgccgcgggggcaccacagggcccagaggccaggggaacagagcccggaacagagggaggagggagcgagcggccgcgggaacggggggaacgggcacgagcccggagagcaggagccccccggaccagaacccaggccacgggccacaaagaacagacagcagacagacaggcaaacaacagggaagggaaacggacagagcaccgccgcgcacgccgcacagggccgcagccacacccaagaagggccggacaaaaaaaaggaccacaccgggcggaacacacgccgaaaacggacaggaacaccgcaggaccacagcgagcagaggggagggggcgggggggaggaaagcaccacagaaagcaaaccacccggccacaagggaaagagaaaagaaaagggcaaaaaagggcaaacaaaaagacccaaaaaaagagcaaggcaacccgcaagacaagcagagcaaaacagagccagacagcagacaaggccgaggcacaaggcaaaacaaaacaaaacaaaacaaaacaaaagcgcaacaagacaaaaagagcggaagacgcaccaagcccaacaaaacccaaacacaaaccgaacgccagccccccgggccccggcgccgccacacacacacacacacacacacacacacacacacacacacagagagagagagagagagagagagagagagagagagagagagagagagagagagagcgccaggacaggaaaaagacaaggggaaaagcagaaaacacagccgaggaggaaacacaagacggcacaacagcaaccgaagagaagcacagcaaaaaaaaagaaaacgcgcagggcgaaagcgacaaaaaaagaagcggcaaaaaaggacgcgcaagcggagggagaagggaaagcagggcacagcccccaggggaaaaccagaacagaaaggaacgagccccgccaggagcgcgggggacacaaagacaaagggccaaccggggcgcgggaacggaaggagcgcaccagacgggagcgcccccaagagagacagaaaaagagagccaaaagcaagagcagggcacggcaaccacacagccaagaaaaccaaaagacaaagaggagaagagcgaagggaggcaggaggggcgccccaggccaggccacccgaaaaacaaccaaacacacacagcaaaaccaagagaaagaaggggaaaggagacgaagaaaaggcagaaaaccccaagagcagacgccccccccccacccccnnnnnnnnnnnnnnnnnnnnnnnnnnnnnnnnnnnnnnnnnnnnnnnnnnnnnnnnnnnnnnnnnnnnnnnnnnnnnnnnnnnnnnnnnnnnnnnnnnnnccccccccccccccccgcgccccaaggcgcccgagggcgaaacgcggcacacacacgaaagggccaagcaaagaacaaaaaaaaggcccaaaagaccagaaggaaacaagaagacacccacaacaaaagcgaacccggccagagacgaaaggccaggaaaacaacaaaacaaggaaaaaaaaaaaccaacaaagcccaagcaaaaagagggaaaaagaaaagcaaaagcagaaagaaaacacgcaaagaagaaaagggcaggagaacaccaagggccaacagagcacaggcagggcagagaaacacaaaagaaaccggggccgccccagacgcaaagcagaccggggcggggccaccagaagacagacagagagaaagcccgggccagcccaggggacaagagaggaacccagcaggacccacagcacccccacccaccgcgggcagacacaaagaacagcaaaacaggaggccagggaaaaggagaagagaaggcagacaccgcgagggaaggcacgacgagcagccccgacaagaaaaaagccaaaccaggccacaaagacagaaacgagcccgaggaggcgaagaccgcagcagagaaagcaagagaaagagcaggagaggaacgagagcagaacaaggcgaaaacggcaggcacaaagggacacggcccacgcacccgcagagccgaaggaggcaggggagggggcaaagaaagggcagaggaagagagagcgcccaaaccaggaacaaagcagcagccggggaggcgcaacggaagcaacaagcgggccggggagcaacaaaccagccaaagaagacacaccagcaggcggaaaaaagaacaagcagccagccgggacagaaggcggggacggagggacaaagccaaaagaacagggaaaaaaaacacaagaggacgacccgccaggcaccaccgcccccggaggcaggaaggaggaaaagaagccaagacggcggccgggcccacagcaacagagaaccagaaccaggagaaaaaaaaccaccacaaagagcggaacgaggaaggccagagcaagcagcaccagacagaacaaaggcagcggggagccggaagggaaaggccgagcgacccagaggaaagagcacaaggggaacagagcacgagcaaaaggccaggaagagccacagccacaagaaacgcgcgagcagggcagaagcaccacgcagaaaacggagagacaacagagggagaggacccaccgagaacggacggcgaaaaggccaggagacaccaaacacaccaccaaggaaaagaacacaggagcaagaggaagaacgacaaccaagaacccacggaagaggcgggagcagcaacagcacaaggacacagaccagacaaaaagagaaagaaaagcgcagcaaaaacggggggaaagggcaggagaggccagggaaaggcaccgccaccagccaacacggggacacacggggacaacccgggacccacagagggaaggagagacggaagccaggaagagggcagaaaagagcaaaaagaccaaaagcaaccacagccagacaaggccaagggaagaagagaagcgacagcagggcggaaacagagggaaagaacagagcaaaaaaaggaaaaaacaggaaacaaaacgggcgggggagagccaaccacggacaagaaaaggaggagaggacaaagacaaaggaggggcaagaccaagagaagcaggggagaagccgcacaaaagaagccacaggagcaggggcccaacaaaggcacgagcacagggaaaggaacgccgccaagccaccccaccaagagggcacacaagacaaaacgggggcagaagccccaagccaggcagcgacgagcaacacgcgccgcacgcagcacaaacaaacgggggcagcggaagcagcagcaaaaaaaacagaaggaggaagggaaaaaaaacgacaaaaagagcaaagcaaaaaaaaagagagggaaaagaaaaaaaaaaacaaagcagaaaaaaaacaccaaagaaaccacggcggaaaagaaacaaacggggaagacagcgcagcaacaagaaaaacagaaacgagaggccaccaggcaaaacaggagggaggcgcaacaacccaaagcccgaggagaacgcgacacgcagccagggcgacaacccaggcgcaggcccccccccaaccccacagggagacgacggaagcacacaaaccgccccgcggcaaacaccccgagacaggccgggaaggccgcaagaaccaggaagaaaaacaccaacaaaaaacaaaaaacaaacaaagccaaaacaaaagaaccagccgaccaaccaaacaaccaacaaccaaccaaccaaccaaagcaaccaaaccaacaaccaaccaaacaacaagaaccaaaacaaacagcaaaacaacaaccaaacaacacccaaacaagaaccaaccaaccaacaaccaacaacaaacaagaacaaccaaccaaccaaccaaccaaaaccaaagccagccaaccaaacagcaacaaccaaacaacaaccaaaaccaacaacaaacaagcaacagcaaccaaccaaccaaccaacaaacaaacccaaaaaccaaaacagaacaacgccaaagccccaagccaacacggaaccaggaacggacacccaggaaagccaaccacaacaggaaagccggccgaggaaaacagcccggccaaagcaaggccaagggcaacccgaaaagaacacaaagccacacacacaaagcaaaagagagaacaggagaacgaaaaccaaaagacaacaaggcaaacaggaagccacaccgagcaagccagagcgacaaaccggaagccccaggagcacagccacgcaggggacaacacgagcaggacgcaacggagcgaacgagggccaccaagacacacaaaccaaaaaccccggccgaccccaaaagaccaaaaacaagccgggaggaccgggccagagacgaggacaaccagggggggacgaggcgaagggaagaacccaggccacaacacaaaggcccgcacaagcaccccacgccagccaggcaagaagaagccaaccaagaccacagaggcccaacgagccagaaaaaggaaggccccacaacacccagcagaccgcacaggaggccaaggggacacagcaaaccgaggcacacaggccagccaacccccagggacacacccccacaacaggaagacagcggaacagaccaaagcaaaccaaccccacaagcaaagacgccaaagaagagacagcaggggagcaaacaaaaaagcagagccacaagaccaccacaaagaaaaagccaacacgacgggcccaacacaaaaaggcaaagaaggagaaagcagcaaagagcccacggcaagacaaaaacagggacagcagagcggcgaggagggagaaagaggaacacccccaggggggagcaggcgacaaccaccggaaacagcggcggcccagaaaaggacaagacacggaggaccgcaaacccccgggcaaacagaagagcaacggaaaagaacacagccacagcaagcagccaaaaagccagaagcggaaagaaccagagccccaacagaggaagggacagaaaaggaacaacacaaggagacaccagcaaaaaacaagaaagaaacgggaaaaggaggaccggagggcacaccaggaggaacccaacacaaaagaagcaagaagcaacgaaagggaacagcccagaaacagaaaccaagaacaagcaaaacacaagaaaacaagaaggaagaccaacagggaaccaccccaaaaggaaacaaaaacccagaaaggagacagagacaaagggagcaagaccaaaaggaggacaccagagacaccccaccaggggaccacacaaacagccaccaaacccagacacagcaacaccagcaaggaagggacccgaaagcgccgagaggcagccaagccggcaaaacagaagggagccacagcacaaggaggaacacagggccccaaggaggagcagagaaagacccaaggagcgaaggggcgcaaccaaggggaacaacaaagaacaacagacccccagagccagcgagcacaagagcagaagaggccagggccacagggaagagaggccccggcgcaaacagccccagacaggggaagccagggccaagaaggggagggggggaggggagcagggaggggggagggaagggaacccgggaagcagaaagaaagaagaaaaacaaaaaaaaaaaacccacagcaaccagccccgaccaaaaaacaaggccgaaaggagacaagcgcagaaaaacaaaacacaggcaagaaaaaaaaagaaacaaagaagcgcagagggcaaggaaaaaaaaaacaaaaacgagcaaaaccaaccccccagaacacgccccacgggggccacccaggacagaaaaggggggcgaaaaagaccaaaaaacacggccagaaagccagacagagaccaaagcacacagcaaaacaacaaagaacgaacccaagaaaaacaagaaagagaccagggcagagacccgcggacagggggggggacagggcggaccagccaggacacagcgggggagacccgggcacacaagcaaacaaccaaagaaaggaaaacaaaccagaacaagccaacaggaaaaggccagacgacgagagaaacaaaaaaggcagggccccgcaggggcagcaggggggggccagcggccccacggcgagggcagaaagcgagagagagagagagagagagagagagagagagagagagagagagagaagaagaaaggcccagagggacagaagggaggacgggaaaggagaaggaggagaaacggagagaacaacggaaagagcaaaaaaaagaacaaacgggcaggaggacgcgccggagaacagggagacacagggccaaggcagaacaggggagcaccaaagaaaaggggagcggggcagaccggggaggggggaaagcacagagcagcgccgccagccagacgccagagacgagggacaccccaccaggcaggacagagagcaacgagcggagacggggaagacacccaggaagaaaaacaacaaaacagaacacccaaaaccccagaggaaaaaggcacaaccaaaacaagcaccagcagaccaagcggaccacgagcagaacacgaagacgcacacaaaacagggagaaaaaaccagggcaggagcgaaagacggggagacgcaagggagacgcagccccaacggcagcacagccagagggaagccagagagccccaaagaagaacccacggagaaaacccagcaggagaagaggggcaggaaggccggaggaagacaggaggaagacgggaaggacagaagaggccaagaaagcgacacaggcaaaggcggagaggccaggaagagcacggcaagggcacacagagggccagggaaaagaagagggaggaaacggcgcccaacggaaccccacgagcgacagccggacggaagcagggcagacaaaaccgcagcggaaagcgacccccaagcgcaaaagcggccagggaccgagcaccgccggaagcgcccagcccggaggcagagacagcagaggccggagcacaca

SEQ ID NO: 630 - RNA, 16604 nt, Mus musculus
gacaacaaccaaaggccgaaaagaaccaaacaacaaacaagccagggcggcagcaagccaagacggacggacgggacccagaaaggggaaggagagaaccaacccaaggccgacccacgggaacaagacaaacgaagcccacacacaacagaagcaagggaaaacaaagacaaaagccaagccgaaacagaaaccacaggacagaaacaagacaccagcaacaggcccccccccccccccccccccccccccggaacggcacaaagaaggcagaggaggggccaaagacgccgcacaaacagccagggcaaaccaaaggacgccaggcgagggagggacccaaccaagacgcagcagcagggggaaagggcagggggccgccagcaaagagcagggccgcaagaccagaccaaaaagcagaaaaaacaagaggagccggacgaggggcaccacgcaaacagggaagcagcccaaaacacccccaagaggagcgaaggggccagacaggcaggagagaagcaggccgggacgagagaaggaaggggcgaagaggagcgcacagaagccgcgcccaggccaaccgcgcagagacgcgagggggaggagggcgacagaggagaccagcgaacaaggaccgggagcgccagacccggggagcgcagaaagggcgaggggaaggcaggagaccaaccccgaagaggaggaacccgggcccgcacagccccacaccccagcccaccccgagaaacccccccgaggcagagggagaaaacgcggagccagacgaacccaagaaggggaagccagaaacacaagggaaaggcccgaacggccacaaagcgccaccagcccccgagagggcgggaccccgagaaaccccccccacggggggggaagcccacgccggaaaaaaaaaaagagacagaagcaaagaggggagagagccccacagcgcgcaagggggacccgggagcgggaccccgaagcccgagaaacgaaaccccccgcagcccagcgaacaccacaggaaccgaacgcaaagcaaagggcgaagcggagaaagcaaaacgaccagcacgaagggaaacggcggggagagagcccggagccccgaaccacagaccaaacgccacaggagagggaggcggaaagagaacccaaacaaaggggaggggccacgagcagaggcaaaaccaccagacgggcaagggccgcgacgaggagaagggacggagaggagagagccccaggccccagcaggacgagaaaaaggcaccgagaggagcccccaccaaacacaaaaggcaaggagcgagaaagggaaagccagagcagccaaaagaaaacagaagaaaagagcgaagccagcccccccagccgccaacaaagggccggggaacccccaccggccccagaggcaaaaaaagccccaaagcaaacaaccaaaaaaggaggggagcacgggccaaaggccagagagagggacccaccagcgcagcagcggggaaaccaaggaagaggagcaacacacccgccgcccgcccccccccccccccacccccagcccggggcccagggccacaacgaggggggaagagagggggagaagaacggacccagcacccccagcagcaaccaggaaaacagaacaacaaaaccaccgcgggcggggggccaaagaaggcgagaacagcacccccaccacagggggaaggacagcagaggagaggaagcaacgccgacaaaagcgaggagaaggggcacacagggcgacgggggggggggcccccaggaaacaggcggccccaggacggcacaggcccacgccagccccccaagacacaggcagcgggcggccaaggccagagaacagccagaagcagggcccgccaggcgacccaaagagccccccaaagcccagcaggaggcacccagcaggaggacgggagggggggggagggggggggggcaggcgggggcccccagacaaagcccgaggcccacacaaccgaaaacagggcgggggaggaaccaggccaagccagcaaagccaccaacaagacaccccagcccaaagaacaaaaaaacgggaccaaaagcagagcgggaggggagggaaggcaaagggcaagaacggcaacgagcaacaggaggcgggggggggggagggggaggagggaggggcgaaagcaccgccaaccggggaaagcccacaacgacaagcaaagagcaacaccggacaaacacgaaaacaaacgggaccggaagcaggacaccacacaaggcgagaacaagaaagcgaccacgcagacccaccaggcccagacaggcccagagggagaggagggcaagaaaacccaaggacacggcagggagacagacagccagagagaggagaagcggcaaggaacaccacacacaaaaggaaaggggagaagaaaaccagaagagaagagacccagccaaaagcaaccaaaaagccgcacacacccagcgacgcagcaaaacgacagcacacgacgcgagaaaacagcccggggcaggagaccagagcagcagagcaggggccaaagagcaaagcgggacgcccccggcaccaccaccccgagacgagaagaagccggaacaaagaaaaaaacgcgccccccaaaaccccaaagacacggaggcggaaaaggaaccaacgcaacaaggaccacgaagcaaggacccaccggaccagcccgcgacccccaggggggaccagaccgcaaagcagaagacaagaagagacgacaccccagagagggcaaggcccccagcacccgccccgcgacggagagaaacagaggcgggcaccagggcaaaggcaccaccaccggagaagaagaacggccgggaggaggcccaaacacagcacacaaagcgggggagaaccccaagccagcccccaaaagaagcagcggcgacagacggcacggaagagcagaccggggaaccggaggcacacacgaaacagcgaagaacacacccggaccgcccccaccagagcaaagcacacagcgagccggccaccgccccgggccccgaagccgacagggaacacaagcgcccccacgacgccccgagcccccaaagaacaaaagaacagggacccggaaaccggagggggagagagaggcaggcgcagaaaaagacggcgggacacggaggcaggggaggacaccagggccccgccaggggcgggaagacaggaccgagggccaggaccgccagccaggcaagccaggccccaagcaaccccacccccacccccaagcccagacgggccagccccagcaaccaccacacagcccccacccgccggccagcaaaagcacgcagaccccaaagagcaccaacaaccacggcgcgggagccgcaaaaaagaacagcacaaacaaccacacaaaccacgagaagcccaaggaccggccccaccccaccccccggccagaggccaggaccccaaaacggcacagccaccggggcgaaaacaggccccagcccagaaacacgaacagacacacagggagggccagcaacgggaacagccccgggcgacggggacaccacgaaaaaccacccacgccgcagaacaacaaaacaaaacagccaaaaaggcaaaccagaagaagccaccaaggcgcagaccccgacccaaacccagggaagcaacagacacagaaaaccaaaacaacacaaaagacagcaagaaggagaagacaaaggaaaacggaaaaaaggagggaaaaaaaaaaacccgcgacaagaaaaaacaccgagaagagcagcccaaagaacacaaacaacagaaaacccacacccaaagggagggaaaggcagcaacgaaaagaagcagcacccccagaaaaacgcagccaaaacagaaacacaccagcaaaaggagccgggcaacggaaagcgaaaggcaacccgcggacacccaagggcagggagcaccaggggccaggacagcagaacaaagccgcccccccccccacccccccccaggggcagggccagaacgcacaggacaagaaagagcagcgacacagaaaagcaacaagagaacaaaaccagacaacagcaaaagacaagggcgcaacaggaacacaaccacacaaaacgagcaaaaaagcaagagaaagcgcaagcaggaaagggaggaaaaggagggaccaggcaggacccccccccccccccccccccccccccccccccccccccccccccccccccccccccccccccccgaagaaaccaccacgaccagaaaaacagcagaaacagcggcggcacgccagagggggaaggaccacccacaaacaaccgagaagccgccagcacggaagcaaccaagcaaaaggggagcagaaaaggaccaaaacgggcgggaccagaccaacggccagcaaaaacagagacccagggaaaaacaccagcaaccaaagaaaccacacggacacacacagccggccgcgggaggcgccgcgggggacacgggccaccagcccccgaagcaggagggaccagaccggcagccgcagacgggaaaaccagcggcccaaaccggccccacagcacgcagcgacggagcaggccagggcgggccacgaacagaggggacacgaaggaccgaaaccggacaaacagagcacagagcacgcaccacggcagcagaacccagacaagggggggaaccgaaaaggacaggggcaccacaaaccaggcacaggagggagagcgggccgaccacaccacaggaagccaaggaagccggccacagcaaacaccaaagggggagagaagaaaaaaaacaagggaaagaagcccgaccaaagaaacaacggacaaaaagcaacacccaccccaaaccagccaagcaggacccacccaaagacaaaccaggcaagcagggcacagacaaggccagggggggggggggggggggggagcaccaacggggagggcccaggaacagccacggagacaggcccaggcggagccacaagaggcaggggaggccagcagcccagggagccacccagcaccccaggggaacaaaagggccaccagcgggcaaggggcgggaagaaagcaggcaggcaggccagcacaccaaggagccaccaggccagaaaacccccaaggaggagaacgcaacacagcccgaaaaaaccaggacagagcacacaaggaaacaaagggagacgccgcaaagcccggcgggcgaacgaaccccgcagcggcagggaccccaccccgaaaagacaaaagaacgacggccacagggagacgaaccagaaaagaagggaacgaggcaccgggaggaagcagggcgagccaggagcaggggagcacagccgaaaccaccagaggagcaagcaacaggcaaagggcaacgacaagagcaggcgagaggcaggaaaggggaggacccaaagagagcccaaaggggaaaaagaaggaagaaggggacgcgaggcaggacacccagcagaggacaagaagagacgcagaagagaagagacccgcgaaggccaagacccccacggcggcaggaacagaggcccgagggaacggcgcacgcggcccacccccacacacggcgggcccccccaacacaaggacaacgcccgagaggcagaccacacagccagaagcgagacgagccagcccaccaagacagcccaaagggcacccccagagccaccgaaaagaagagaccccggcggcccccccacccacgccaaccgccacccggcacacaagcacaggcccacgggggagacagggacccaaccaggcagcggacaggcagagaaaggaagagagggaaaaagaaggggagggaaggcaaccaagccccacaagcgcagcccaggcaggaaaagaaacaaacgaacccaaaaggcgccagagaggcaaggggagagacggggcagggagggcagagaaaacgcacaaaccaggaccagccaccggcggcaccacaacacgaggaaaaagacgcccggcagcccaaagaggcaaagggaaaagaaaaggagcaacacgggcccggaaaagaagcagcaaaaaaaaaaaacaaaaagaaaaaaaaaaagcaagcaagccgaacagccccggggaaacaaaaggaaaaaaaaagcaaaaaggacaaagcaacgcaggccgccaaaaggccgagaaacgggcgggaaggagccccagcgggcccggggacaaaaagggagaaaaacaggagaggaacgcagggccgggggaaggaaagagaaaaagacagcgcaaagggaaaacaaggaagagggaaaaaaggcagcagaaaaaaaccccacacacaaccaaccggggggggggggggggggggggggggggaggggcacaggccaagcgcagaagccgacaccaaaaccccaacaagaggagaggacagagggccagcaaaggcgagaagcgggcccaacggccagcagggagagacggagcagccagcacacgacagaacaaaggcagggagagaagcccaaacaagggaaaaaagaggcaggaaagaaaagaccaaagacaagggaaggagcagaagagaccagcaggaacagcccaggcgggccgacccccacgaaagcgccagcccacagaaggccgggggagggcggaggaaagccacacaagaaacacacaaagacccccaagagcaacgccaacacagacaccgaggcaccaaacagcagaagaaagaccagcgaaaaagagccagaggagggcaaccaaagaccgcaagccgaaaaaggaacccacggggacaaacccaaaaacgagaagcagccagaaacagaagaggccagcccgaacacacacccaaccaaaaccaagcaagcaccgcccacaacaccacgaacgggaacagacgaaaaacaaaaacccgcgaaagagacccacagcccaagaggcagaagccagagagaaggaaagagaaagaaaaaaacacaaaaaaaagccacacacgacccaagaaggggccacaggccgggcacaagcagaacgcaggaggaccgccccggaagagggagagggaagaaggcagggagaagggaggagaggcagagcaggaaaagaacaggcaccacagacagagacgccagcccagccccggccgcccggccaccggggcgcaaaaagagaaagaaaacaccacccaaagaaccgggaaacaacacagaaggacgaggaagaacagaagaggagggcgaaaggggccccaagagggaagaggcacagggaggcaaggaggggcgggagagggggccgggaggaaggagcacggggggggccgaggccaggaagccgcccaaggcagaagccagaccgggacaaacaagagcagaacccagccccccagcacagcgccgcagcgccagcccgcagagaaagggcgaacccagaacggaagccagccccaaaaagccaaagaggccggcagggcccccagcaaggaaacccaacaagacagaagacaaaagaacaaaagaagacaccaaggcgcccagagagaacagaagcaggccagagaaccgaaaaaaagaaaaagagcacggccagcagagcgaccccacccacgagcccccagaaaaaagccaagcaacacacagaaaaaaaaaagaccacaacgaacacgacaagcacggacacacaaggaaaacaacgagacaaaaaaccaaccaccccaaaagcacacggacaaaaaaagaccaaacaacccgaacaacaaccccggccccgagccgccaccccccccccacggacccccccaaaaacccccgcccagcagcggggcgcgcgcgggggggaaaaaagaagaaaagagaaaaacggcgagcccacggcaagccaaaaaaaccagcgcaaccgagacaacagacacaaaaaccaggaaagaccaacccacacccggagcacacaaacccaaacggcaagacaagcaaaaagaaacacacacacacacacaccacgagagcacccaaggaaaagcccagaagcccacacgacgcggaagcaagcaaaccgagagcggccccggaccaggcgcacagcagaagcaaggcaccaacgaaacgaaaacccgaagcgggcaaccaagccagcaaggaaagacagcaagaaaaaaaaaagaggaaacaaccaccgagcaaccaagcaccagaaacccagacgaagcaggcaaacaaccgacgaggccgaagaaaaaacaccaaaaaagggaaaagaaccaaaagaaagcaaaagaaggaaaaccagggaacaagcaaaacaagaggaaacagcaacagcgcacaaaaggcagagaggagggcaacgagcccaagagacaaagccaaaaacagggagcccaggaaagcgaacccaaccagacacagcaaccagacgaagaaccaaagggcgagcacaaaagcaccagcgcaaaccagcgcccaggcagggcaagacccacaaccagcggccgacccagcccaaaccggacggaaagcccagagcagaggcggcggagcaggaggccaggcgcggagccagccaagggcacgcggcggggaggcagcgagagaagaggccccaaacgcaaagggagcagcgcacgcgccaccagcaacaaaaaaggggggaggccggcaggccccgcaaacaggagagagacaaagccaccggcaccccagaagcaggcacagagacacgccaggcccccaagccaagacaaaaaaaagagaggcagaaaaaaagcggcgggcgggcacaagcaccgaaagaacccaaggaggaggagaacagaccacagaagcccccgccagcacaaaagaagaaggcacgaggaccgggagagcacaaacccccggaagggcaagagggcaaaggaagacgcaaaacgcaaagccaagggagagagaccccccaggacgcggcgaaacaacaacaacaacaacaacaacaacaacaacaacaacaacaacaacaaaaaggacagaagccgaccaggcgcagaagcaaaaaccaaaggcagaccggggggccaaaaaaggcccggaaggacaaaaagcacaacacagcaaacccaagccggcaaacagcagggagcgaaggcgcagcaggcccacgaacaagagaggagcgcgcggaagcgagaaggaacggaggccaggacacgaacacagcaaggggcgcgacgcccagccccgaggacagcagacccaaggcgggaaaacgagagcacgcgggagagccgcgacagcaccaaggagaaacaccaaggcaacaagaaggcgggagggaccggccacaggggcagaaaacacaccagaaagggagcagcaaagcaggcaggcacaaggggagcagaggcgagagcaacgacccacgaaggggagaagagagcacacgaaaaaggggggcgaaaccgaagccacagcaggacacacaccccaacaaggccaaaccccaacccaaacagccaccaacggggaccaagacaaaggccagagacgggggccacaaaaagcacagcccagaagggacagggagaggaaaaaccacagaaaaagcaaggaagacagaagcggaggaaacaagaagcacgcaagacagaagggccaggccgggaagaaagacagaccaaaaggaacgggagaggaaagacaaccacagcacagccaccaaaaggaagcagggcaggaagcaaggcaggaaccggagacagagcgaacagagaccggaacgcgcagggcgccacacagcgccagccaacaacccagaaccggcaagggaggcaccacccacaggggcggaccccacacaacacacaacaaaaagcccaggacgcacaaccgggaaggcaacaacaaacccccgacaaaaaacaagcggcaaggacagaaacaacggcaacaggcaaccagcacgccacaaaaccgcgccggaccagggagaacaagcacgagaaagcacacaaaagagcaagggcagcgccaaagaagacgacaaaaaccaggacaccagacgagagccccaccccaccgcggcggccgggaacacacaggaacggggggggcccagccagaggagcaaaaagcgcagcccgagggggagccaaagcaagggggcgggcccccagggcagcgcgcccagagcaggcagacaggggacacagcgggggcaggagccacgaacaggaagggcgcgaggaggccaagcagcccaggcgaaagcacaggaggagccgacaggcacccaaccggcgggaaaaaccggcacacccggaaaggacaaacagggagagggggcggaagagagggaggcccccagggaggggcggggcgcgcaggacgagcacagcccccagaagcaggcaggcaggacaagaaccgccggaagagaaaagccacgccaagagagaggcggggccgaaccaccgaccccacaggcgcccgggcagaccacgcccacaccccgagaggcccccggcaccagagcccccccacaaggccaccccccagaacaggcgaacggaagacagcagaaggagagcggcaggcccaaaccgagccaaggcaagagaaccagcgagaacagcggccccaaggggaaagaggccggcaaaaaccaggaagcaaaaccaggacacaagcaacaggaagagccggaccccaacaccaaacagcagaacccccgcgggaaagaaggagaagcagcccaaaggcgaagggggaccaaaaaccaccagcaaagcggaaaagggggacgcagaaagccgcaagggccagcccacccgcagcccccagaggaacgagaagggagggagcgaaagaagacccacaaaggaaaaggaaccgggagccaaggccaaagaaaggcaagaaaaaagcaagaacagagaaaccccacaacgacaccacaaaacccaggcgcagacaaaggagacaagggggggggggaaccccacagaagggcagaaacaaacagccgagggccccgcggggcggagccacagggaaaggccagacacaaagcgccacacaaaagggggcacggagaagcaagaaggcgcgcccacccacgacagggggcacagagaaaacaggaccaggcacagcacagagccgcgcaggcaacggcgagacagcacagagggaaacagccgagcaaacgagaccaacggcccgccaaacgaacacaggaaagaagcaacgccacacaacacaggggaagggagaaagagaaaaaggaacggcagagaacaacacagaacacacaaaacacgaaccaaaagggagaaaacagccacaaacccaggaaggacgaggaagggcgacaaaaggaaagacagaaagccaacagacgagaaaagacaggaaaacggacaacacaacagaacacccaaaaaacaggaaggaaagaccaaaagcagcaccagaaagccccaagcagaaaagcccgacagggcgccccccaaggcgccgaggccggccgagagaccggccagagcaaaggggcaaagggaaagaggcgaaggacgaccggcaaacggagaacccaaaagacagccaaccgacggcaccgggacaaaaaagccacaggggggagggagagcaagagagaacagggcccagaaaaacacaggagacgggcaaaccgggaagggaaagaagaagggagagaacacaaagcccgagagaaagacgggggaagccagagcaaaaagcgcaagaaaaaaccaaacagaaagaacccaggagaggagcacaaacacaaagaagcagggcaaagcaagaggcacgaaaggacccaaacccccccagcagggagggaacaagcaagaccgaaccaccccagcggaagaaagcaggaagccagacgcggaggaacagaccaaacgcaacgaagacgacaggaagcacaccccccccaccccgaagcaacccgcggagaggcaccacacggggaaggaaagaaagcagccagcgaaccaaccagacaccacaaaacccagggcaggaagcccagaccccacaaagacagacaggaccaaaccacagaacgacgaacaaaacccgcacaacacaggcagagcagagagggggagacgaagaaagggggggacggacaagaacccaaggacagggcgggaagcccagagggcccagagcaccgcaaggaagagaccacacacggaggacgacaggacgcgaagcaccagcccgagacccgaggcagagaccaggcaggcagccgaggggaagaaagaccaccacccagccgaccgggcagcaacagcaccagaccaaagggcaggacgaagagccgagacaagcagaggaagcaaaggacacaggcgccgacacacggagggggggcgaggccacgacgggagaaacacaacgacgaagccgccgcgaagaagacggaaccgaaacgaagcgaaaaaccccccaaagcgacagggaaaacagcaaaagaaagaaagaagacacacccacagggcaggcaagcaacacaaaaaggagaagaggaaaacaaaacacacacacacaacacacacacacacacacacacacacacacacacacacacagacacaaagccagagacgaacaaaaaagaagaaaaacaaaagaggagccgaccaaaaagacaagcaacagcaaaaaagcacacaagggagggaagaggccagcgcagaggacccaaggcagcacagaaccaagaaccaaggagcacaacccgcaacccagccaggggaaaaacgaaaggggggaggagaacaggccagggaccaacaaggcgcagacggaaggcacgagcagaaggcagccgaagggagccagcggcgaggacagagaaacgaagaagagacaagccaggaaggacgcaggagggagagcaggcaggcaaagagcagagccccaacaggccagcagaaaggggccacccaaagaccgaaacagacaggcaaaaggccgagaagcgaaaagaccaaaagaggagcccccacgcaaaaaccagaagaagagaccccacaaaaaggaaaacccccacaaggaccagggaggcacagagagaagagcaaccaaaaagacaccaggaagagaacacaggcccgaaaaacccggaagcccacaaggaagcagacgccccccgacccggaaaccagggcccccaccacaacgaccagaggcaccaccccggaagagggagccaagagcggagcgggcccaaggaaaagagagggcaagggggaggcagggacacaaaagcggcagaagcaaccaagaaaacaaagagggccagagaaccaaagcccagagcaaaaggaggcccagagaagaagacagccccccaacagaacacggaaaaacgcaaaacgaaaaggacaaagaacaaaacccacgcccaaacgcgccccaaaccagccaacacacccgccgcccaggccgggcccgagcagagaacccccaagaaggcgagagcgagaggcgcggagagggcacacgcagccccaggggggggggggggggccaaaggaagggaacccaaagcacacacaagagggggcaaaaagccaagggaagcagaacacgacccccaccaaacaaggcaggccccaaaccacccacgagggcaaccagagcaggccggggagcgcaccgcccgaggagaaacagggggcgcccgcccacccagcaccacgggcggggacccaacccagcaacaaagcaaggcaaccacgagccagccccagccccccaaccgcaggagagggacaaaggcaaaggccagcggacagcaggaccaacacagccccacccacagccaagaagcacccggcaagacagaggccaggcccagaaaccccacaggacaggacagaaggcaaggaaacagagcggaaagcaaaacaagccaggggggaggcagcacagggaggcgggccggccaccagagcacgaagaagagagggcacccgagcccccgccacaaaacgaaagaagggggaagagcggggaccagaagccaagcaagcacagcagcggggcaaggcgaggaacagcgcaccagacagcaggaagaaaaagggaggggacgcgccgccgaaaaagacccccaccacaaaaggcaggggggacaagagaggacaggccggcggaaaacaccagaccaaaagcaacggagagggcaagggacagcacagcccccaggcacaccaccgagcagagaaccagcaggaaccaaggcaggaacaagcagaggccaggaaggggcgccacggcgcccccacggcgccagcgcaaaaacccaagacaagcccagggggcaggccacaggggacaggaccaccacacaacaaacacgccacaggccaacgaagaggcacaagaggccagaaacaagcagcgggcaagcaaaagagaacaaaacaacaaaacaacaacaccgaagaaaaagcaaaaacaacaaagaacaagggaaaaagcacacgcgaacaacaggagaaacaagcaaagagacggccgcacgcgggcaaaggcacggggaacagcagagggaaccagcagaggagcaggagaggacggaaagaagagacgccccagccagaccagaaagggacagaagagggggcccagacacggcaaaaggaccacgcacaccagggaagaggacgggaaaagaaaagaagagaagaagggaggagggcggggaccaccgcaggaaaaacaagagaggagcccagcaccaaggaaggcagaccaaccggggaaagggacaacaaccagcagaagcacagggagcgacgaaacaggacggacagcaacccgcaaacccccaggacgcgaagcgaagggaaaccaacagacaggcggagagccgggacacagggaccgcgagccccgggccagagcccaccggaaggggccgcaagcaccccgagcgaaaccaccgacaaggggcgaaaaaacacggagaggagggaaaagaggaggccaagaccacggaggccaccccccggggagaaaggagagcaaacaggcgggcaaggccaacagcgaggggcagagacaagaagccaggacagggcggaaaggagggcagcccggcgagcccgggcccaggcacgcgcggccacacaacagggaaagaaacagccgaaagcacagaggccgcaggacgggaccaggaaacaccccacgaaagagacgggagcccagaaggaagacacagaaacaccggcaacaaaacaagcggaaaacaaacaaaaaaacaaagcaaggcacgagcggaaaaagagaaagccccaaaaaaaggggagcgggcagaaaaaaagaaacaagccaaaacaaaaacaccaagacaaacgggaacagaacggcaacgaacaaaagaaggaccggagacgaagagaggcagcagagcagggggccgccgggccagcagagaggagggggccgcgagcagcccagcgcaccggggccacagggccacaccacacaggggacgagcccgccccaggggcacagcacgcagcaacaaaaacacaaacacaaagaaaaaaaaaaaacaaaaaagaaagggaccggagaaaaacgagccagagaacggcaagcaaccacggaaccccaagccagcaagcaaccgcgccacaccgccaccgccaggagggagaaaaaaagagccgcacaggccacccccgcccagagccagcagcccgcagcccagcagcgcccgcccgcccgcaccacccccgcccagcccccgcaccgcccccgcccaaggccgccccacgcgcccacccccccaggccccacacaaccccccaaaaaaccccaaccagaaggcagggcccccaggacccccgccaccaagcaaacagggccgagaccggacgcagaaagggcagcacacaccaacaccagaaacaacaaaggacccaggaccagaagccaggggcagagcagacagaaccagccagcccaaaagacccccccacagggcaggaggaagggagaaaagccgacaaagagacacgggaaagacagagccaacgaccaacgccagagaggccagaccagccaccaacagcacacaagacccagaagaacaggacacccaggaccagacagagcacagacagcggcagggccaccagagaacacaggcgagcaggaagaacaacagccccccccggagcagagaagccaaacccagcccacagcaccaaaccccacgcccaaccccaccagccccagagaggaaaggacacgcgaagaccaacagcgccaagcccgccccgcccccccgccagcaacgggccgaaccgcagccgccgggagcgcccgacaccagcaaaagacgccacaacaggacccgcacacaagggaagcgagcagagggaaaagaccccgagccccagaacggcgcgcaaaggccaggagaggcggcacaccaggagccagacccaacagccgggcaggcaggaccagcaaaaaaccacgcacagcacacagggacccaaacagggggggccgaaggcaagggccccacag

SEQ ID NO: 631 - RNA, 1006 nt, Mus musculus
ccaggcccggagagccgggagaaacgaaaccagccgcaagacagggggccggggacaccccccgaacacagcgaagcgcagccgggcaggcggaggcgggaggaaggagcgccaagaacacaccaacggacgagcagagacgggacccagggcaccgccggccaggggagaaggcacaccggcgaccgggaaggagcggcaccaggccagcccgccccgggaggcgaaagcacaacccacgaaagacaggaagcaaagcacgagacacaggaaggggcaacacaccacacccccccccagccccaggcccagcggacccaggaccaggccaagggcgaagacacaaacgggcgcgaaggacccgaacacagggacacgcccagagcaagaggaccggagaggagaagaaaacccagggaacgcaaagagcggccggaagccccgacgggaaggaacaggcaccgcaggcaccagaacaggcccagggagcacacgcgccgagggagggcccgcaagccggccgggcgacacacgagcagccgggcccgggcaaggccggcccacaacccaggcagcgggcacaagcaaccggcaccgcgaaagcgcaagcgaacccacaccccagagcagggcgaaagaagcgccaggaaccgagggcccagccaggccgccaagcaagacccccccccacacccccaggcacccgcgaccacggagggcccaagccaccccgccagaagcccccgcccccccacccgcgaacagaaagacgccacccacgcgccgagaaccccacacgcccaccagggcgagaccacccagacacagagaccgccagcggccaaagaacaacagggaccagcccgaaaccccaggggccccccgcaggggggagggagcaacccaccaaggacaaaaacgacagaccagacaggcagaggcccggcaggcagggcgcccacaaacagcacaggagccaggggaaaggccacacagacccggcgcc

SEQ ID NO: 632 - RNA, 11713 nt, Mus musculus
  misc_feature (729)..(6409): n is a, c, g, or u
agaagcaaagaagccaagcgagaagacaaaagggagaaaaaaaaaaagaaaaaaaaagaaaaagacaaagcgacaaaggaccagggcggggggcacgccaaccagccaggaggcgcgcaggccacgccccggcaccggaaccccccaggcccccgcgggcggcgccccgcccgcgccgcggcccaccccgcccacagagcgccgcgcccgggccacgagcagaccgcccgcggggcgaacacgcgggggcagacagacacccagccgcaggaggccggcgccccgcaccgcaggaaggggccacggaccgcggggaggcgagacgcgggggcccggcgaggacgggggggagagagaagggggagggcgcgggaccccggagccccgggaaagagacgggaggagagggccagcggggggggggggagcagaggcgagaggaacccccacagcggggacacccggacaccagggccagccagcgaacagacggcgaaaaaccaaagcacgcgagccccaaacgaccacggacagcacaaaaagaacggcacgcggggggaccggcggagaaggccgcgcccccacgacccggcaagccccgagcccccgggggggggagggccccaccccaacgaaggagaaaagcgcccaggcccgccgcgaccgcaggcgcgagcacgggaggaggcacacagcccacccgggggaaagcccgcaggcggcaccgcnnnnnnnnnnnnnnnnnnnnnnnnnnnnnnnnnnnnnnnnnnnnnnnnnnnnnnnnnnnnnnnnnnnnnnnnnnnnnnnnnnnnnnnnnnnnnnnnnnnnnnnnnnnnnnnnnnnnnnnnnnnnnnnnnnnnnnnnnnnnnnnnnnnnnnnnnnnnnnnnnnnnnnnnnnnnnnnnnnnnnnnnnnnnnnnnnnnnnnnnnnnnnnnnnnnnnnnnnnnnnnnnnnnnnnnnnnnnnnnnnnnnnnnnnnnnnnnnnnnnnnnnnnnnnnnnnnnnnnnnnnnnnnnnnnnnnnnnnnnnnnnnnnnnnnnnnnnnnnnnnnnnnnnnnnnnnnnnnnnnnnnnnnnnnnnnnnnnnnnnnnnnnnnnnnnnnnnnnnnnnnnnnnnnnnnnnnnnnnnnnnnnnnnnnnnnnnnnnnnnnnnnnnnnnnnnnnnnnnnnnnnnnnnnnnnnnnnnnnnnnnnnnnnnnnnnnnnnnnnnnnnnnnnnnnnnnnnnnnnnnnnnnnnnnnnnnnnnnnnnnnnnnnnnnnnnnnnnnnnnnnnnnnnnnnnnnnnnnnnnnnnnnnnnnnnnnnnnnnnnnnnnnnnnnnnnnnnnnnnnnnnnnnnnnnnnnnnnnnnnnnnnnnnnnnnnnnnnnnnnnnnnnnnnnnnnnnnnnnnnnnnnnnnnnnnnnnnnnnnnnnnnnnnnnnnnnnnnnnnnnnnnnnnnnnnnnnnnnnnnnnnnnnnnnnnnnnnnnnnnnnnnnnnnnnnnnnnnnnnnnnnnnnnnnnnnnnnnnnnnnnnnnnnnnnnnnnnnnnnnnnnnnnnnnnnnnnnnnnnnnnnnnnnnnnnnnnnnnnnnnnnnnnnnnnnnnnnnnnnnnnnnnnnnnnnnnnnnnnnnnnnnnnnnnnnnnnnnnnnnnnnnnnnnnnnnnnnnnnnnnnnnnnnnnnnnnnnnnnnnnnnnnnnnnnnnnnnnnnnnnnnnnnnnnnnnnnnnnnnnnnnnnnnnnnnnnnnnnnnnnnnnnnnnnnnnnnnnnnnnnnnnnnnnnnnnnnnnnnnnnnnnnnnnnnnnnnnnnnnnnnnnnnnnnnnnnnnnnnnnnnnnnnnnnnnnnnnnnnnnnnnnnnnnnnnnnnnnnnnnnnnnnnnnnnnnnnnnnnnnnnnnnnnnnnnnnnnnnnnnnnnnnnnnnnnnnnnnnnnnnnnnnnnnnnnnnnnnnnnnnnnnnnnnnnnnnnnnnnnnnnnnnnnnnnnnnnnnnnnnnnnnnnnnnnnnnnnnnnnnnnnnnnnnnnnnnnnnnnnnnnnnnnnnnnnnnnnnnnnnnnnnnnnnnnnnnnnnnnnnnnnnnnnnnnnnnnnnnnnnnnnnnnnnnnnnnnnnnnnnnnnnnnnnnnnnnnnnnnnnnnnnnnnnnnnnnnnnnnnnnnnnnnnnnnnnnnnnnnnnnnnnnnnnnnnnnnnnnnnnnnnnnnnnnnnnnnnnnnnnnnnnnnnnnnnnnnnnnnnnnnnnnnnnnnnnnnnnnnnnnnnnnnnnnnnnnnnnnnnnnnnnnnnnnnnnnnnnnnnnnnnnnnnnnnnnnnnnnnnnnnnnnnnnnnnnnnnnnnnnnnnnnnnnnnnnnnnnnnnnnnnnnnnnnnnnnnnnnnnnnnnnnnnnnnnnnnnnnnnnnnnnnnnnnnnnnnnnnnnnnnnnnnnnnnnnnnnnnnnnnnnnnnnnnnnnnnnnnnnnnnnnnnnnnnnnnnnnnnnnnnnnnnnnnnnnnnnnnnnnnnnnnnnnnnnnnnnnnnnnnnnnnnnnnnnnnnnnnnnnnnnnnnnnnnnnnnnnnnnnnnnnnnnnnnnnnnnnnnnnnnnnnnnnnnnnnnnnnnnnnnnnnnnnnnnnnnnnnnnnnnnnnnnnnnnnnnnnnnnnnnnnnnnnnnnnnnnnnnnnnnnnnnnnnnnnnnnnnnnnnnnnnnnnnnnnnnnnnnnnnnnnnnnnnnnnnnnnnnnnnnnnnnnnnnnnnnnnnnnnnnnnnnnnnnnnnnnnnnnnnnnnnnnnnnnnnnnnnnnnnnnnnnnnnnnnnnnnnnnnnnnnnnnnnnnnnnnnnnnnnnnnnnnnnnnnnnnnnnnnnnnnnnnnnnnnnnnnnnnnnnnnnnnnnnnnnnnnnnnnnnnnnnnnnnnnnnnnnnnnnnnnnnnnnnnnnnnnnnnnnnnnnnnnnnnnnnnnnnnnnnnnnnnnnnnnnnnnnnnnnnnnnnnnnnnnnnnnnnnnnnnnnnnnnnnnnnnnnnnnnnnnnnnnnnnnnnnnnnnnnnnnnnnnnnnnnnnnnnnnnnnnnnnnnnnnnnnnnnnnnnnnnnnnnnnnnnnnnnnnnnnnnnnnnnnnnnnnnnnnnnnnnnnnnnnnnnnnnnnnnnnnnnnnnnnnnnnnnnnnnnnnnnnnnnnnnnnnnnnnnnnnnnnnnnnnnnnnnnnnnnnnnnnnnnnnnnnnnnnnnnnnnnnnnnnnnnnnnnnnnnnnnnnnnnnnnnnnnnnnnnnnnnnnnnnnnnnnnnnnnnnnnnnnnnnnnnnnnnnnnnnnnnnnnnnnnnnnnnnnnnnnnnnnnnnnnnnnnnnnnnnnnnnnnnnnnnnnnnnnnnnnnnnnnnnnnnnnnnnnnnnnnnnnnnnnnnnnnnnnnnnnnnnnnnnnnnnnnnnnnnnnnnnnnnnnnnnnnnnnnnnnnnnnnnnnnnnnnnnnnnnnnnnnnnnnnnnnnnnnnnnnnnnnnnnnnnnnnnnnnnnnnnnnnnnnnnnnnnnnnnnnnnnnnnnnnnnnnnnnnnnnnnnnnnnnnnnnnnnnnnnnnnnnnnnnnnnnnnnnnnnnnnnnnnnnnnnnnnnnnnnnnnnnnnnnnnnnnnnnnnnnnnnnnnnnnnnnnnnnnnnnnnnnnnnnnnnnnnnnnnnnnnnnnnnnnnnnnnnnnnnnnnnnnnnnnnnnnnnnnnnnnnnnnnnnnnnnnnnnnnnnnnnnnnnnnnnnnnnnnnnnnnnnnnnnnnnnnnnnnnnnnnnnnnnnnnnnnnnnnnnnnnnnnnnnnnnnnnnnnnnnnnnnnnnnnnnnnnnnnnnnnnnnnnnnnnnnnnnnnnnnnnnnnnnnnnnnnnnnnnnnnnnnnnnnnnnnnnnnnnnnnnnnnnnnnnnnnnnnnnnnnnnnnnnnnnnnnnnnnnnnnnnnnnnnnnnnnnnnnnnnnnnnnnnnnnnnnnnnnnnnnnnnnnnnnnnnnnnnnnnnnnnnnnnnnnnnnnnnnnnnnnnnnnnnnnnnnnnnnnnnnnnnnnnnnnnnnnnnnnnnnnnnnnnnnnnnnnnnnnnnnnnnnnnnnnnnnnnnnnnnnnnnnnnnnnnnnnnnnnnnnnnnnnnnnnnnnnnnnnnnnnnnnnnnnnnnnnnnnnnnnnnnnnnnnnnnnnnnnnnnnnnnnnnnnnnnnnnnnnnnnnnnnnnnnnnnnnnnnnnnnnnnnnnnnnnnnnnnnnnnnnnnnnnnnnnnnnnnnnnnnnnnnnnnnnnnnnnnnnnnnnnnnnnnnnnnnnnnnnnnnnnnnnnnnnnnnnnnnnnnnnnnnnnnnnnnnnnnnnnnnnnnnnnnnnnnnnnnnnnnnnnnnnnnnnnnnnnnnnnnnnnnnnnnnnnnnnnnnnnnnnnnnnnnnnnnnnnnnnnnnnnnnnnnnnnnnnnnnnnnnnnnnnnnnnnnnnnnnnnnnnnnnnnnnnnnnnnnnnnnnnnnnnnnnnnnnnnnnnnnnnnnnnnnnnnnnnnnnnnnnnnnnnnnnnnnnnnnnnnnnnnnnnnnnnnnnnnnnnnnnnnnnnnnnnnnnnnnnnnnnnnnnnnnnnnnnnnnnnnnnnnnnnnnnnnnnnnnnnnnnnnnnnnnnnnnnnnnnnnnnnnnnnnnnnnnnnnnnnnnnnnnnnnnnnnnnnnnnnnnnnnnnnnnnnnnnnnnnnnnnnnnnnnnnnnnnnnnnnnnnnnnnnnnnnnnnnnnnnnnnnnnnnnnnnnnnnnnnnnnnnnnnnnnnnnnnnnnnnnnnnnnnnnnnnnnnnnnnnnnnnnnnnnnnnnnnnnnnnnnnnnnnnnnnnnnnnnnnnnnnnnnnnnnnnnnnnnnnnnnnnnnnnnnnnnnnnnnnnnnnnnnnnnnnnnnnnnnnnnnnnnnnnnnnnnnnnnnnnnnnnnnnnnnnnnnnnnnnnnnnnnnnnnnnnnnnnnnnnnnnnnnnnnnnnnnnnnnnnnnnnnnnnnnnnnnnnnnnnnnnnnnnnnnnnnnnnnnnnnnnnnnnnnnnnnnnnnnnnnnnnnnnnnnnnnnnnnnnnnnnnnnnnnnnnnnnnnnnnnnnnnnnnnnnnnnnnnnnnnnnnnnnnnnnnnnnnnnnnnnnnnnnnnnnnnnnnnnnnnnnnnnnnnnnnnnnnnnnnnnnnnnnnnnnnnnnnnnnnnnnnnnnnnnnnnnnnnnnnnnnnnnnnnnnnnnnnnnnnnnnnnnnnnnnnnnnnnnnnnnnnnnnnnnnnnnnnnnnnnnnnnnnnnnnnnnnnnnnnnnnnnnnnnnnnnnnnnnnnnnnnnnnnnnnnnnnnnnnnnnnnnnnnnnnnnnnnnnnnnnnnnnnnnnnnnnnnnnnnnnnnnnnnnnnnnnnnnnnnnnnnnnnnnnnnnnnnnnnnnnnnnnnnnnnnnnnnnnnnnnnnnnnnnnnnnnnnnnnnnnnnnnnnnnnnnnnnnnnnnnnnnnnnnnnnnnnnnnnnnnnnnnnnnnnnnnnnnnnnnnnnnnnnnnnnnnnnnnnnnnnnnnnnnnnnnnnnnnnnnnnnnnnnnnnnnnnnnnnnnnnnnnnnnnnnnnnnnnnnnnnnnnnnnnnnnnnnnnnnnnnnnnnnnnnnnnnnnnnnnnnnnnnnnnnnnnnnnnnnnnnnnnnnnnnnnnnnnnnnnnnnnnnnnnnnnnnnnnnnnnnnnnnnnnnnnnnnnnnnnnnnnnnnnnnnnnnnnnnnnnnnnnnnnnnnnnnnnnnnnnnnnnnnnnnnnnnnnnnnnnnnnnnnnnnnnnnnnnnnnnnnnnnnnnnnnnnnnnnnnnnnnnnnnnnnnnnnnnnnnnnnnnnnnnnnnnnnnnnnnnnnnnnnnnnnnnnnnnnnnnnnnnnnnnnnnnnnnnnnnnnnnnnnnnnnnnnnnnnnnnnnnnnnnnnnnnnnnnnnnnnnnnnnnnnnnnnnnnnnnnnnnnnnnnnnnnnnnnnnnnnnnnnnnnnnnnnnnnnnnnnnnnnnnnnnnnnnnnnnnnnnnnnnnnnnnnnnnnnnnnnnnnnnnnnnnnnnnnnnnnnnnnnnnnnnnnnnnnnnnnnnnnnnnnnnnnnnnnnnnnnnnnnnnnnnnnnnnnnnnnnnnnnnnnnnnnnnnnnnnnnnnnnnnnnnnnnnnnnnnnnnnnnnnnnnnnnnnnnnnnnnnnnnnnnnnnnnnnnnnnnnnnnnnnnnnnnnnnnnnnnnnnnnnnnnnnnnnnnnnnnnnnnnnnnnnnnnnnnnnnnnnnnnnnnnnnnnnnnnnnnnnnnnnnnnnnnnnnnnnnnnnnnnnnnnnnnnnnnnnnnnnnnnnnnnnnnnnnnnnnnnnnnnnnnnnnnnnnnnnnnnnnnnnnnnnnnnnnnnnnnnnnnnnnnnnnnnnnnnnnnnnnnnnnnnnnnnnnnnnnnnnnnnnnnnnnnnnnnnnnnnnnnnnnnnnnnnnnnnnnnnnnnnnnnnnnnnnnnnnnnnnnnnnnnnnnnnnnnaaaagaaaaaaaggacaacagaccaaagaacacacacaaacaggccagcagaaaaagcaaaccacccccagaaaagaaagggggggaaaaaaaaagaaaagcccaacaaaaccacaccggcagaaagacaaaaggcgggaccacaacaaaaaaacccgaaagcagcagcaaagcaaccggaccaacagcaaaggggggaaaacggaagaaaggggcaaacgccacggagagaagaacacacacagaaagaaaaaaacaaggaaaaacaacccaaaagagcgcagcacccaaagacagcgaagcaaggaaagaaaccacaaaaaaagacaaggaacagaaaacgaaaccagaaaagcggaaagaaccacaacaaacccaggaagaaaagaagagccaagaaaagcagaagcacacacaacaaagacccagagggaaaaaaaaaacaaaaaaaaaaagaacaagaccacaagacgaacagcacgacagaaaacggaagaaaagaccaaagacaaaagaaagaggggacacgcaaacaacaaccacaaccacacgggcccggaaggagaaaagaaacaggcaccccccacgacacacaagcacagaagagaagggcagaaagggaagagacagacccaaacacccaagcgggcaagaacggaaaaaaaagacaacgggcagcaacagacgcggaaaggccccaaaagcaacaaaacaagaccagccaaaagcaggagaaagcaaaacacaaagagaaaacaaacacaggaaaggacacaaaaaggacagaaagccacaggaagacaacgagcaaaagggcagcagcagcagcgcaaaacacggcaaaagaaaacccccagcagcaccccagcagaacaaagaaggaaagggaaaccaaaacaaagacaaaagccacagagggaacgagaaacagaaaaacacaaccccgaaacagcagcggggccaaccaggccacagcaaagaaagccgagagcccagcccagccgcgcgcacccagagcagagaaagacgacaaacgcgaaggcgacagaccacaacaggacagcccagcacaagccggccaaaaaccacacacaacaaaggggcacaggcccacccagccagaccggaggggcacccaaagaccccaacacggggggggcgcagcacccccccaggacaccacggaagcaagcgcagggccggaagccacacacccggccggggggcgagggcagcacggggggcacagggcccgccgccgcccaaaccccggccagggccacccccagaccgaggaaaccaccgagaccaaggggagacagcacacccgccaggagacacccagcacccaggagagacaacgcgaacccgcaggaaaccccagccagggggggagacgcagcaaggggcgcagaccaacagaggcgcaagcggccacccacacaggcaagcacgagcaccgagcgccggaaaacccacaagggaggaccagaaacccccaaaccaaccgccgacaccaccgccaacccccaacacaaccagaccaaaaaaacaagaccgcaacacacacacacacacacacacacacacaccagaaacaaacccgcaaacacacacaaaaaaggacacacacaaggaccgacagaacagcagaagaacaaaacagaaaaagcacaaaccaggagaaacccccccccccccccccccccgggggggggggggggggggcaggaggcagcagacccagaaaggacagaagccgcacaaccagaaaacacagcagggagcagcaagcaaggagcacaggccaccccagcacacagacaagcaggccacccgaggccagccggcacagagaaccaaccaggaagagccaggcacaaacgaaacacgacaaagcacagagcaaggggaaaagcaagccccccccccacaagaagaagccaaaggaagagagaaggaaggaaaggggggacaggaggagagggggaacacagcagggggaaggggcgacagggcgaacagcagggcaacaaagaagggagccacaccagggagagggagagaccggaagacaaagaggggacagagaagaaaagagaagaggaaggagaaagagcagacgaagcgagggagccgaggaggcagagcgaggaggaggagaagcagaggaaacgcagaagaacccggggacgcacaggaaagaagggccagcgcgcacgccagccgccccgaaggaacggcagaccgggaacccgaggcagacgagaaaaggcgaaacaaacaacgcacgcccaaggaacgcgagggcacagcgaaggggaagggaccacggggggggagccgaaaaggggcagcacaggagggcacacccaccagccccagggacagggacccggccccgggaggaggacagagccccggaacgcaaccagcacggggccgcagggcggacgaggaacgacccgcagccacacaccaaggcagcaggcccaagaaggacaggcaaagagcagcccgaaggagccggccgcgaacgggggccacacgcaacgggagacccagggcacagggagggggggggcacgaacaagaccggcaagcagggagggggacaaggcaggcagccgaagacgccccggggacccagaggcgccccacggaccgcccgaacccccccccccaccaccacccacggacccccagcagaccagggacaaggcagccacaccacccaccccacccccccccgcgcgcaaggcagggccacacccggcgccaagcacgaaccaccccccccagaccaaggcgggaacaggggagacaccaggccagccaggcaccccaagagaacggcaggcggccacggagagcccggccaaagcaagcgaaagcggggcaaaagaccgcgcacaacagagacccgagacccgggacccccgaaaaagcgggcgggcgggccaggcagggcacgcaaccaggcaggagaagccgggcacggcaggccgcagccacgagagcccaagcacgagagagcgcaaaagcacgaagacgaaaagcccacaaaccgggggcaggaaaaccccgagacagaacacagagaggcccaaagaagcaggcagcaaaaaaaaaaaaaaaaaacacgcacagcaacacagcccaaaaaccaggggagcacaaagcaaaggacaccgaccacaaggcaagggggccagcacaaccacaaaggaacgggccagagggccaggcaccccaaacccggggagcacagaagaggaacccagcccccaggaaacccaagccggaagagaagagagaggggaaacacaagaagggagagagcaggagaacaggcagagagggagaggcaagaggaagcgggaaggggacaggaaagcagcaccaaaacgcaccagacccaaagcaaaagaggagggaaaggaaaaaaagaaagcacccccgccaggaacaagcagacgaaagaccaaaaaagaaggagcacccagaaacacaggacaacaagcacagcacagacaggccgcccggcagcgcaacaggagagccaggaacggcccggcgaggaaagcgggaaaccaggggccaaagggcgggaaaagaaccaaggaaggggagagagaggggccaagcaggcacagacaagcagagaccacccggagaaggaagggagggcagcggggaaaaccgagacgagcccagcagggggaagggccaggggagcagggagagcacgagccacagcggcagccccccagcccagcgcagccacccaggacccgaacaccaggcccaggaagaccaggcaggagccccacccaggcagcaggcaccccaggaacagggcagggcaaaaccagacgaaagcaccaaagacaaagaaaaccccgggacaaggcacgagcagccaccgaccaagacagaaagaggcacagagcaaggacggaaacggggaggcggaagaggcccccgacccccgcagagggacgaggcagaaacccagacgccggacccgccccacggacccaccgcagcacaaggacagacccaagggaaaaccaaccacgaccacaggacaggccaggaaggaaagacacccgagggaaaaaaacagagggaaagcacagagagggcgagcccaaagccgagagagccagaagggagaggaaccagcaacaggaagggaacagaagcaaaggagacaggagaagagagagaggaagagcagagcacagaaggaagagggcgcgaaagcaaaaagagcgaaacccaccagaacaaaggaggaggaagcaagggaagccaaggggaaggaaagaccgagggcagagaaagccggaccagggggaggaggcaaaaggagaagagaggggcagaggaagagccgaagcacaacacaaccagaaacaaggagaacaggggacgggccacaacacgagaacagcaagcacacaccacaaagaccggagagagagcacgaaacagcaggccaggagcacggaagaacaagaaccagagaaagaacaggaagcccacaaacagcgcgcccaacaaagcaccacacagagaaagccaagaagagaggagagcacaagaaacaaccacagggggaaaagacaggcaggccgaaaacgagacccaggaggagcaggacaaagggaacgaggacggggaggaccaggagcccgcgcagagcaggagaccacgcagagccccaccccgaccagggccaggccacaggccgcaagagccccaagcgggcacacggaacccagcccccagaagcgcccccaccaaccaagaccaacgaagacccaacccggcacaagaacaacaccaaaagcaacccaaaagcaaccaaagaaaaaggcacaggagagcaaagacaggcccgggagaaaaaaacggaaggacgcacacacacaccacacccgaggcgggaaaaaggaccacagagccgggagcacagggagaaagaggagaggaggaaggggggggagcaaccaagcgaaagaacaaaaaaaagggcggaaccacccagaaacaaaaccaccagacaccacaggaaaaccccaacaaacgacacccagggcgagcaccggaggaaagaaggaggaaaggccaggcacaggacgcgggagcgaagaaaaaaaaaggaagggacagcgggcccaccgcaaaggggaaggacaaggaagggcccaaaagccaaagccgccacacagggcggccaccaacagaaccccagacgagccccagcccacagaagggagagaagcgcaggcaagg

SEQ ID NO: 633 - RNA, 1373 nt, Mus musculus
ggccagaaagcaaaccacgaagcccagagaggcgcgcgcagaagcaggcccggagcgcaaccaggcccccagggacggcaagccacccacaaagcaccagagaccgggccaaaacccagaaacaggagagacagggccggagcccggcgcggaaccaccgagaccaggcggcccgaaccaaaaacaccgcccgcccccaaggcgggaaacggcaggccaccaccgcccaagacaacgcagcccggccacgcaggccaggcaggcccaggaaagcaaaaaagacacagccgcccacgccagggagagagaaagccagaaacccaggggccacaacccagagccaggaggccgaacccaacccgcccgaccccaagccaaggcaggagcacagggcaccccaccagcgagccaagcaggcagacgagggccaggacgcacacaaacaaggcagagagaacccgggcaagcaagccaccagggcaccccagcgcaagcaccaccgcacaaagaacaacacaaagccaaacaccgaggaccaggaccggaccgacaacaaagaagcaaacagaaagagccacaagacagcccaaaccccggcacacaacgagaaagacaacagaaaggcgagcgagcccgcaagcagcagaccaagcacggcaaggcccccgcgacagaaagcccaccacagccacccagcacagcgcccccgcgacgcacagcgacagagagggagccaggcgacaccccaagcagagccgcccggaaggaccccaaggccagggcaagacccgcacgcgaagaggaaggcggcgaaccaggccgcggcccccagcgagcaccggagcagccgacgcacccaggagcaacccaaaggcaaaaacccaaaaggggcgccaacaacacaagacaacaacccacacgaaggagagaaggccggggaacacaaacggaagaaaaacaagcaagccagccaagcacaagggccgacacagcagggaaaggaacggaaaaacccaggaacagcccaagacgcacccccaacaggaagaggggagaggggcaaggcgaggcgccgggaaaagcccggccgaaaccccgcgggcggcggcggcagaaagcaccacccgggacagcgggcccggcccggaccccgacccgagccgcagggcaggaacaagaggccgaccaggacaaaagagacaagcaaggagagggggggaaaagaggcccccaagaccagggaagcggccaaggagggcacaaggacgggaccggggagagggggcgggagaaagagcacgggaagcagggcgaggcccagccaagccgcccaggggaaacagccccggcgccgcagacccagagagaacaca

SEQ ID NO: 634 - RNA, 1176 nt, Mus musculus
aaaagaggaccgggggggaagggccacagaggggagccgggaagcagagaaggggcggaaccaccgcggcgcgggaaggagccaagcggcaggggcaacagaaggaagaacgccagcgccccagcccaaaacgagagaaaacaagaagcgaaagcacgagaacagaaacaggaaaagcgacccccgccaaaagcaccagaccgccccggagcccgcggggcaggagagaacagccccagacgggaagcgacaccaaagagacgaacgcagacaaccggccgcggcccccacgagaaaagcacgcagcacgcccacagggccccccaccccggccaaccagagggaaggacgaaacaacggacgggaggcaaccagcccaaacgggagaggaggcaggagaggaacgaggccagccgggcacaggacggcgaaaagcagagaagaagaagaagaagaagaaggcgagaagcagccagagcacagaggccaagagaaacaaagcccggacaagccagcaccaaaacaagggagagacacacgcaccaaagcaccggcacaaaaggaggaggcagccgggaacagagacgccaaaaaaaagaggcagccgggaacagagaccgccaaaaaaagaggcagccgggaacagagaccgccaaaaaaaaaaccacaacaaaacgggcagaccccagaaggaaaaaagaaaacgcgagacaggaccaaagccaggcggccgaacccgaaccccgcccaccaaaggaaccagggcaccacaccacgccacaaaaacccaacaagaaagggcgcccaggaccaggaagggagaaggaagcgcgcccaggaacaaacgggcaagaagagaggaaaaagaaagaggccacgcaggacaccacagccagaagagggaaagagcacaacagagggagaggggccagggaacgggagaaccaggacccggaagaacaaccagccaacgcgagccacccagcaccagagacagagcaagggacaaaaggccaggggaggcaaagccccaaaaccagcaccaggggcccaggcagggagagggagggcaaaagaagcaggggggccgacaggaaagaggccccaggagaaggcacgccgcgcggaggaaagaaaccccgagccaagccgccaccaagcccaagggcaagcaac

SEQ ID NO: 635 - RNA, 1618 nt, Mus musculus
aggcagcaggggggcaaccccacggcacacacacagccagcagcccccggggggggggggaacggcgcgcaccgcagcacaccagaggaggagagacaacagaaggggcagcagggcaccgcacaaacacagaccaagaagcaagggggaggaaagggacggcacacccagcgcgcacaccaaaggaagcaggacggaaccaagcaggcagggagcaggagcgagcagagaccaggagggagcacggcgcccaccggcgccagccgccaagaacccagacaccagcccgagaggcccacccacaaggggccccccgacacaagagaaaagccacaagcaccaggaggcacccaacgaagcccccggaaacccagcggcaaggacacaacacagccagacaagaccccgcaacgacacacaaaaacacacagaagcccaacccacaacacaccccacaaaaacaaaagcccacagcacaacaaaacaaccaaaaaccacaaaaccaaagcacaaaaaagcccaacggggcccacaaaacagccccaagagggaaaaacagggcacagcacaacaaaagcaaaagcaacccaacagccaagcgggaccaaccacgaccgggcccccaagggcgggcaccccagccaggcccgagcacacgcacacccaggccagagccgacccacgcgcgcgccggggcacccaggacggcacccaaaacacgcagacccccagccgggccacaagcaacgaggcgcaccaccaaggccccaggccccacaggccaagcccagcgccgccaaccccagcccaaaaccagaccaccggggacccacacaaccaagccagccacagcacaagacaacggcaacggaacacagccacggcccagaaaacaccccagaagagcacccaagagcggcccaacaccgcaacagcccagcaaccagcacaaagcccagaagcaaaggcagagcggacgaacacggcgaccagccccagcaaccagaacacagaaccacaacaaaacagcaaggcccgaaaagagcaaccccgaaacacaaaccagaccccaccgcaggccaacggcccaagcccacacaacaccgacagagccaacaacggaggaccaagcccaaagccaaagccccacagccccccaaaacaggcagggcacaggaaaccccacccggaccaagcagcagggcaccgcacaaacacagaccaagaagcaagggggaggaaagggacggcacacccagcgcgcacaccaaaggaagcaggacggaaccaagcaggcagggagcaggagcgagcagagaccaggagggagcacggcgcccaccggcgccagccgccaagaacccagacaccagcccgagaggcccacccacaaggggccccccgacacaagagaaaagccacaagcaccaggaggcacccaacgaagcccccggaaacccagcggcaaggacacaacacagccagacagggaaggcaacaaagcccggcgcccgggaacccgaccaaggacaaggagcacaaaacggcccccgggccggcacgaccgaccaaaacagagggcaagagaccgagcgcacccaccgaccaaagaaaaaag

SEQ ID NO: 636 - RNA, 3067 nt, Mus musculus
aacacaagaaacggacggcggaccaaggaaccgcccccaaggacagcagccgcccccagcccccaagagccagcaaaaccacagagagggccaccacagcggaggcgggggcagaggggccggcgagaagcggaaagcaggcggaggcgaagaagagccagggaacaaaaggggcccgagccccaagcagcgggcaaccagaaaggcagaagcagagaagaccccagaaggcagagccgcgcgcgccagggggagccacagcagcgccaggggcaacaggccacacagagaaaaaaaacacaaccccccccaaaccccccaaaaccccaccaaaagccccccaggaaaaaaccacacaagcaagaaaaagaaaaaaaaaaaaaacgaaacaagaagaaaaaggggggggggggggggggggaaaaacaagagacagggcgagcacaaaggaggagccaagaaacccagaaaccacacccaagcaagacagcccacccgagagcaaggcaaaacagacaaaaagcaacagggagaggaaggaacagcacagcagcagggcagcaaaggaaccaaggcagaaaccggaggcaggaaggaagcagggagcaggaggcagcgccacggcgcccccggcgccagccgcaacacccaggaacaccgcccaagggggcaccacccagagggggagcccccacagccacaacaaggaaagccagagcgcagagccaaccagaacacccagggcccccagaaaccagcgacaagagacaaaacagccagcaacgggccagggaaaaccaggcgagaggaaccgccccggggggcagcccgagaacgaacccagagacaaagcccaccgagcagagacccaaaaggaaaacacaccaaacagggaggaaaagaacaaaaccaacaaccaaaaagggaagagacacaaaaagaaaagccaaaggaggaaagcggagaaaaaaaccaggaaagaaacggaaccaagagcaagcacagcaagacaaacaagagaggaagagagaaccagacagaagaccgagagaacaggcacaacaacaaagcaaaagcaaaaagaacaaccaaaacaccaggaaaccaggacacaagagaagaccaaaccaggaaaaggagagagagaagaagacaaccaaaagacggcaaaaccaacaaaaaagaagaaaaccccaaaccaaagaaagagagcccagaacaacaagaagccaagaacccaaaagacggaccagaaaagaaaccccgacacaaaaacagaacaacaaagcacaaaaaaaaaggaaaaaagcagaagggaaaagggcaagaacaaaaaggcaagccacagaaacaccagacaccagagacagaaagccagaagaccgaacagagaacagacaaaagagaacacaaagccagcccaggcacaacccagccaaaccaaacaagaggagaaaccaaagaccacaacaaaaccaaacacacaacccacaaaccagccccaaaggaaagacagaaaaaaccaaacaaggacggaaaccaagcccagaaaaagcaagaaagaacccaacaaaccaaaagaagacagccacaagaacagaagcaaccaacaaaaaaaagaaggaagcaacaaaaccaaaccaaacaaggaccaacccccaaaaaaagacaaacaacagacggcacacaaacaggacccaacagcgcacaggaaacccaccagggaaaaagaagacacacccagaacaaaggcggaaaacaaccaagcaaaggcgaagaaacaagcggagagccacaaacaaaaaaagacccaacccaaagcacaaaaaagacaaggagaggcaccaaccacaaaacccaagagcaacccaacgaaaaagcccaaaacaagggcagccacacaaaagaaacagaaagccaaagcacacagcaaccacacaaaaggggagaccaacaaaccaccaccaaggacagacaggaaacagaaacaaacagagacacaggaaacaacagaagagaacaaaggacaacagacacagaacaaccaaaacaaaaggaaacccccagcacccagaacccccaaaacgaccacaaaggcacaaaacaagcccaacagaacaaaaaagaaagccagcacacagacaccaggacaaggcgaccaaaaacaaaagaaaaggaaagccaaacacaggaaacgaacaacaccccaaaaccggcaaagaaggaaaaagaaagaaaaaagacagagaagaagccacaacaaaccaaacagggacacaaaaagcacaagaggaaaacaagccgaggccccaaaaagaaacagagagagcacagaagcagcggcaacacaccaaaagccagaacaaaagagcaaacacccaagaggagagaggcaggaaaaacaaaccaggagcaaaacaaccaagggaaacaagaagaacacaaagaacaaccaaaggaggagcagcgagaaaacaacaagaagaaaaccagccagaccacagagggcacagggaaagcaccaaaaacaaaacagaaagaaaagggagacaagcaacacgccgaagaaaccaaaacaccacagacccacaaaaggcaaccaagaaaacggagaaccggaaaaaggacaagcagaagaaccaggaccaaagaaacaagacagaaaggcaaacagccaacccaaagaaaagaagagcaaaaaccccagccaaaaacagcccaggccagagggaggcagagcacagacccaaagaagacaccccagccacaaacaccacaaaaagaagcagaaggaccacccaaccacagaagcacaaaccgaaccaaaccacagaagaacccaacaaagaagagaaccagaccaacccagaaacgagcaaaaacccaaaaagcgcaaaccgaaccaagaacacacaaaacaagcaccacccgaccaagaggcacccagggagcagggaggcaaaacagaaaccacaagaacagaaaaacaaaccaaagacaaaaaacacagacacccagagcacacagaaaaggcggaaagacagaaacaaggcccaaccaaacgaaa

SEQ ID NO: 637 - RNA, 20402 nt, Mus musculus
  misc_feature (11895)..(11994): n is a, c, g, or u
  misc_feature (16318)..(16417): n is a, c, g, or u
acagagacccaccccaccccagcccaaaccaccacccacagccacagcaagaaacagggaagccaggagcggccgacaacaccgcacaagagggccccgacaccgccggggggggggggggagagggcacccaaggccaacccccccaacgacaacggcagacgacggggagggagagagacaccaggcgagccccgagaacgcccgcccggcaggcccccccgggccgaagaccccaacaaaacccggcaccaaaaacaaaaccaggaagagaaaggggcaccgggaaaaggggacaggagagaggggaagcggagaagggggaaaagagaagaggagaaaacccgaagaaacccaagacacaagaaacagcaaaaaacgcagaaaagaggccaggagcgacagaagggacggaaaggagagggggaaggcccggccacacaagaaaagccgggcagagcacccaagcaaggaggaggacccggaccacacggccagccgcgacccagggagccaggccaggagagacccaccaaaggagaggcagcagcgggagcaccaacgacccgcccacacacggacccccccccaacacacacaccccaaaacaaaacagacaaaacgaggcccggggaagccgggaggaagaggcgaaagcgcccccccaggcccaacgggagagacgcagcgaggcccccagcgcagagacccccgggccacccccgaccgaacacagaggaagccggccccgggggggggagggccagggaccacccagccgccagcgagcagcggcagccagagaggcaggcgggggggagaggaacgcagacacgagccccccccacacgcccagagcacgggaacacccaacgaggcgggggcgccccacacccacgccgcggcaaggggaaccgccacagaggcagaagggagcagaaccgccacccgaagagcggagacacacacccgggggggaacgaggagccggggggagcggccaccacgacaaagaaagccacacgcggggagaaaacaccagcgcccacgaggaaggggccagaagcaaaacgacagcgggaaagcagccagaggaggccaaccaaaaaagggagggggggcacagacccaaggggaccccagaggagagacagaaaaccaagcagagcagcccccccccaagccaggaggcccaaggccaggaaaaaggggggcccagcccagcacggggaggggaccggggacaggaaggccaggaaggaaggcaccggccaggcgagggcaaggggaccggcccccaggcagagacaccagaggaagacacccccagagcccggccaccggacaccccaagccccaggaccaaggacaggagaaacccagaaccaagagcccacaaaggacaagacagggggaggcgcagacacacggggaggacacaacacagggagggccagcacacacaaggaggccgcgccccaggaggggccaccacacaggggcgacggggcgcagcgcccgcaacagcaaccgagaggccggcacaaagacaacggggacagaacgagggacaggacagccacgcagaagccagaagcccaagacaagaggaaccccgaaggacaggggacgcacccacggcgcggaggcgcgacccacaggccccccgggggcacagcaagcccgccgaaggacagaagggccagccaggaacccccacgacacaggcaagaccccgccgacaagcagaccccgacagggacaacaacagaaaggggggagggcacaaccaacccagaggggcacacaccgcgggggacagaccccaggggggacagggaccacagaggacagagaaagccggggagaaagccggaagaccaagcaaaaggggggcccaccccagacagagccaggccacccgcccaccgggacaacggagagaaacggccccagggaggagcaccaagggcagcaaagagggccccccaagccagaaaacccgcccgaccaccgccaggccaaacaaaaccccgaaccagggagaagaggaggaccacagaggcgggagcacggaaggcaagcccagaaggacaaaacagaaagcaaagcaggaggagaagaggacaaacaggggccagacaccagagaacaggagaagcagaggcaggacacacagggaagaacagagaggggaaggagagggccagaagcaagagggaaggggaagacaaagcagaaagccaccaacaccaacaacaccacaaccaacacaccacacagcagacccccaaacaacacacaccaaagcacacaaacaaaccacacacagcacaaccagacacgcaacccgcccgaacccaaagaaggaaaacgaaaaagaaaggaaacagacaaaagaaacaaaacagagcccaaaccaaggagacagggaaggacacagaagccaaagaaaaaaaaaaaaagaagaagcggaaacacgaggcaggagccgccaaacggaaaggagggaggcaggaaaacgaacagaaaaaacaaaggcaacacaaacccaggaaaaacagagaacaggaagcggaggaagggggcgcggagcagggccgggaccagcagagcagcgagcccaggaccaaggaccgcgggaagaggaggcagggagcccaggggaggagaagaagaacgccaccaagcagaaacacacaaaagccccaacaggaaggagaaagagaacgagacgacagaaaaagaccagaaagaaaacaaagcagacaagaccccagagagggaaggggggcacaggcccaggaacaaagcacaaagacgacacgggggacaggcaaaaagaagcgaacaagcagaagcgcgagccggggaagcaacaacagcacgggcccggcaggggaggggaccggggcgagccgccggaggcggcagcgcgagcgcaaagaaccggcccggagccaggccacccaacgcccgaaagagcggaacaagccccacaaacacccaccacgccagcgcagggaacagccgcgcccgcaggggcaagggcgagagaccggccccgccacccccacacagacacacagcagccagaacgggacagcggcagccggccacccaggagaagcacaaccgccagcccaccgcaacccagccaccagcccagacggcccaaccccgaggggccacagacaacgaccaagggcagagacaaggaggccggggaggggagcaggaagccaacgccccgagcaccgggagaggacgaacgaccaggacagaaacaaaggggggggaggggaaacagaccagagaaggaggccgcggggcacggagggagagcaggggagagaacgggcaagcccggcagcgggacacgacgcagggcgaagccagacccagacccaggaccgggggaggaaacccccaagagaccaagcgggagacgcggaaagcaggggcggagaggcaaggagaagaagggccagcacaccagagggaccagcaggacccaaaaacagacgggcgggggaaggaggcggagaagccggcagaaaacccagcacggaaagcaaaggcaagaaagcaagagcaaggcacagcaacaggaagcaagacagccgggcacacaggaccgaccaccaggggccaaccaccagaacaccagcacccacgaccaggggacaggcgccccgggcgcgcagggacaggcgggacgggcgccgcaaagacgccgagacgagggggcaggagcccccccggccggggcgcaggagaagggaggcaaccacgccgcaacaaagcaaaggccccaggggggccaaaagaagcagaacaccaccagggccaggccacaaagagacacagaggaggagcgaagaaaaggcgggccaccccaccagcccccgcaggccgcaaagcagcagccgaaaagaggcggaaccgcacgccagagagccaaggcggggacacagaacgcagcaggcagagggacaccgagccagccaccgagaccacaagccaccggaacagagaaccaaaggaccgcaggaggaggcagaggcaagaggggacaacaaaccagccacgcgccccccggggaccgaggagccccacggggcacaggaccagggggggcccccaccgagccaggggacaggaaagagaggggggccagcagcaggccgccggaaaccagcagaagcaccgccgcagccagggccccgccgggaagagaccagcaccccccccagggacaagagaggcgagggacacgcgcgcgaaggggccccaggcaggagcccagggggaagccggacaggcaggccagggagccagacaggggcgcaccgacgaaggggggagccaccaccaccaccagacgcgcagcaagaaccagaagaaaagaaagaccacagaaaccagccaggacgggggggacacccaagcagaaaggaacaacaagcagccccccccccccccccccccccccccccccccccccccccccccccccccccccccagaaaaaccaaaacaggcgggcaaccgaacgcaaacccagacaaccgaacccgaccccgccaccccaaggcgagaacccgagcaccgccagccggagggacggggccaacccagggcccagcaggagcaggaccaccaacgagccacaccccaccccacccgcagaacagcagcgcgcgcggcggggggggggggggggggggggggaagccaagaggccagagacaagccagaaccccaacacgaacccacacacgcggcacacaccaccaccccaccaccaccaccaccaccaccaccaccaccaccagagaaggcaccaaaggaagcaggaggcagacacggggacccaggaacccgcccagccccaccagaacagaggagagccacgccagaaagcggacaagcgaccgggccggcgcagcaagcgcgacggcaagcacccccaccaccacgcgcgccgcgcacacacacacacgccgcgccacagccaagagaccaggacaccccgcacacagcacagccgaagaacagcgagagagaaagcggccacccacccgacaacagagcgagggaggccagggcggaacccagaagaggagcagcggagggggacaggcaccaccccccccccccccccccccccccccccccccccaacccaggagcgcaggggcaggcggaccaggacccagaagccacaggccgggcacaccccccccagcaagcccaggaggcagagggagcgccagacaacccagcagaaacaccgacccaaagacagcaggcaccaggagggaaaacaagggccagccggggcagcggggggacgggagcgcgagcagccacgcgggacccccgcccacaggcgaggccagaggagcggaccacgagaacacgcaacgagacggggaaccccacaccgagcgcagcagagagggaccagcgcaaagcgggaagccaggacgcccagggagacagccccacggcccccagaaagccaagggccacagaggcagcccccacaccccccgaggacccaggcgccaccacccccccccccagagcagcaggcaggaacagcagcacaccccccaggggcggcgcccccagccacaccgcccagcagagaacccccccccccccaggggacaggacccggagcccacagagccgaggaagaaagccccaccagccggaaggccccaaaggcagaccagaagccccccacacacaacccgcgggccacaccaaaagaaagagaaccgcaaagagaaccgaaaggagagggcaagagccgacaaccagaccaccagggacaagagcaaaaggaacacagacaagcggccgcagacacaccggggggcaagcgaaagcgaggaggaggaccagcccagaggcagcaccacccaggcaggggcccgaagaggaaggaggaacagcgaaaagcaaggagcagcagcagaagaccacacaacacagccaagaaacagggggaggaaaccagcacacccacagcgcacacaaaggaagcaggacaggaaccaagcaggccaggaagcaggagcgagcagaggcaggagggagcacacgggcccccggcgccagcgccaagaacccaagacaccagcccagggaggcaccacccacaagggcccccccccgacacaggagaaagccacagggaccaggaggacccccaagggaggcccccggaaacccagccggcaagcgacacacaaacccagccagacagacgcccacaaccgccgacggagaaggaggcggcgcggagcgccgcgagagccccagagaacagaacgaggaagacaacccaagaaccccccaagggagacgggagcaaagcaacagaaagggaacaggaaccccaaaccaagccaaggaaagggcaccagaaaggaaggagaaagacccacaaggagagcagggaagccacgagccagaggagcgagacaagagcaaggcaaaggcagcagacggaagccgaaacaaagccacccaagaccacaacacacgggcagaccaggggaagacagcggagacagacacccgagcagccggaggcgagagcagacgaggaggcgcggcagagacggacagcagcaccagacacagggcccagcccccgcggccgcgaacccaccacacagaaccccaccacccccaagacaaaacacaggccccgaacagcacaaaggacgaacaggccaccacccccacagcgaagagggccaccaggagccacagagagaccagaaaccagcccggagagccggaggcagagacccggggggggggggggggggagcgagcaccgggagaggccaagagccagagccagaggaggcaacacgggcgggaggagagagagagggaagaaggggcaccgaggccggcgcagagaccggggacacacgccgcacccgaagccaaagcaggacaccagaaaggcaagacccccgaaaagggagacaagggcccagagaaccagggggcccccacagcgggccgaaaagaggggcggcgccagcaccacagccccacacccaacacaggacacccggggaacagccacgggaaggccccgacgcaccgagacgagcaccagaagaaccagaaaccaagcaccgagcaagcccagcaacagcacgaagagcgcaggaacagaacccggcgccgggggagggagggcaagaccaggaaaaagcggaggaacccaggcaggcagggggggagcgccggaccggcggagagccagaccgggccccagacgcccaaccagcgggcaggacaacgcaacacaacgcggacaaacagcacagcagcagacaacaaaagcacacacacacacacacacacacacacacacacacagaggagaaagcagcagcgagccagcacacagaaacgaacagagggaagccaagggaaacccaggcaccggagccaccaccgcgcgcgcgagcaggcaccacgaacggagcacgagaggcaacaggcggccagcaccagccccgacaccccagcaggggaacaaggggccacccgcgacgaggggcggagagcggcaggccccagcgcggaccggcgccaaggacgcccccagcccggccaagccaggaagcgaaagcaaagaccaaggccacgggggagagcagcaccccgcccggcacgagggaggaaagcccgcacgagaagagcgggaagccgggcggaaccgacccagcagcccccaaagccgggaacaaccgcacggccaggccaaggccgagaccacaacccagcagagagcgcccagcccaaccacagacgccccgcggaagagagagaaaaacagacggccagagcggagacggagaagaccgagcgggggcaaggcacgaccagggaacagaaaggaaacgaacaaccagggaggggcacgggaccaccccaagggaaggcccaaagggccgaacccccagggacgcaaagccagaaaggaagcccaggagagcagcgcgccgggaaccacagcgcagaccagccgagcccacaccaccaccaccccggccccgggggcacaaggcacagaaaggccccaggacagggggaccggaggggaacgaaggacaaaggggcaggaaaagagggcaggcccacggcacagaggagggcggaaaaaaggcacgggacaaaagaggggggggacacccgcccgcagaggaaggcgcaacacgccaagaggaagcacgcagcgagagcacacaggcaagcaccccccccagggaggcggcacaagcccagccccaggggacccgccgcacgagaagcgcccaccgggggcaaaagcaacccagccccgcgggcgggggcagaacggcacccggccagcaaccggaggagcaggagcccccagcagaggacacaaccaaccaagcagaaaaaagaccgcccccccaaggcgagcgaacgccccaggggccgggacgagggagcagggggggaagggagaacccgaaagaaccgggggaaggcagcgacgccgcccaggccaggagacgggacagaggcacaacagcccggcgaaaacaggagccaccacagggcacaccaccccaagaccagcacccacacacggcgggaaacccccacggggcaaccccccccccccccaaagaaaagcaggaggaaggaaaggaagcgccagcgaggacgagccaaaggagggagcaggcgacaggagcgagaggggaggggggaggcaggagggggaggagaaggggggggggagggagagaagagaagaggaggaagaagaaaagaacggcccaggagcggaccccaggcagaaggcgcaacccaggggcaaacccccccgcgaagcccggaggcagcccagaggcgcccaggagacacggacccccgcaggcgacagaaaccacacagccgcagggccgccgccgccggaggaagagcgcccccaccaaggccgcccgccacccccaaacacggcgcaccccgccaccacccccccgcagcccccccccgggccgcaggagcaaaaacagaagccccacaaaaagcccagcagaaacacaagcgcccacaccgcgggggggggcccgcaggggcgccacaacgcccagcccccgcacgccacgccaacagcgcggcacggccaccaagacacccggggcggggacaacagcccgcacgcgcagcacgcgcggagcggacaaagagaacaacagggaagccagcccccgccgggcccccccggcgcacccagcccgacaggcacccgaaaaccaccaaaacgggccccccccccaaaaaaaaaaaaaaaaaaaaaaacccgaacaccggaacaccaaccccacagccacccacgcaaggccaggggcccaccccacggacgggaacaggcccggaggacggccagcagagggagcgcccgcagggaccaaccccggaggccgagccgccccaccaaaggagagacgagaccaagggagaccgagggacacagaccaacccgagacagggccccggccccggacaacgaggaccaccacgacagcaccacaaaagcaaaccacaaaggggggaaccaagaaacaggcgcggcagggggagagcacccagggccaaggccagccgcggagcagcgaacccaaggacccaaaggcaagagagggaagcccagcccacacaccacgagcaaaaaaggggggggggggggggggggcaaaaagcacaagacaaaccagagcgaaagaagccaggcggcggcagagcaacgagacgaaggcccccccagcagaaaccaagacagaccgcgccggcccccaccccaagcccccgcagggagggcgggcagccgcacaaggaacgaggagcccccgacagcccagcccggcaaccaaaaaaccagcaaaccccccgggcccccgaagggacgcgaccacacagcagacgcggcacagagagccgcccgccagccaaccacagcccgcgcgcaagggaccagaagcacgggccggcaacgggggagaaagacggggacagacgaaagaaacaaggcaacagaagaaaccaacccgggaaagggcagggaaggagccaagaccaagaagagcggcagagagagaggcgaggcgagccgaggcccaaagcccgcccccccccacccccggggggggggacacgagccacgccggccgccgacgagccagaggggacacaaccccacagaaacgaaggcaccagccgagaaaacaagaacgccgcagcgaggccagacccagcgagcggacgaaggccaagaaggacggagcagcccgccgggcggaagcagccacgaggccagggagcggcccaccggcacccaggcccggaggagaaacagaaagcccaggggcacagcacaaagccccgaaacagccagcaagcggcagagcaacaggcgcacggaggaggcgcacgggaggccagaggaaagcagcgcaccagaagcaccacaaacgagacaggaccgcgaacgcacagcgacggagacggacgagcaggagccgccaaggacacaccgagccccacccagacggggccaggcagcaccaaccagacgggccagggggcggggaccaagacagaggaaggcacgaaggaccacccccgcgcccccccagccccccagagcacccacggaacgcccccaacacggaagccgccgaagacgacaggcagacaccggagacgacggggcccagggcaagcgcgagcgcaggaaagacaagaaaaccaacagcaccgcgagcagcgccagagggaaagagcggcagcaagggaacaagcgaggggccagggcacaagaggagccgggggaccccgaggggacagaaacccagggaaaagcaaaagagaaggccaccagggaccgaccccccccgccaccccagccaggaacccagaccgggacagcaccaggggagggaggaagggggggggcaaaaagcaccgaggcacacgccgacaagccccagcccccccccagcagcagcaggagacggagaggacaccaaggccacacaaggccaaacccagcgcgcggcgcgccccgagcggcccgggggagggcaggcgggaccggccaaggcgcagaacagggaacagcgaaagaacggaggaagaaaaaagcgcgcacccaggaaaggcgggacagaggacgggaaggacccaccaagccgcccaccacccgcaggccccaaacacagggacacaaagagcgggaggaagcacaggcgcgaacaaggcggaggcgacacacaacacccaccccacacacaccagccccccaaagcaagcaagggcccacacagcaaagcacggcacacaacagcagaggagggagagaagaggaggggaaagagggagagaacaggggacacagaaggcgaggaaccccaagggccgggcagcaagccacgcaggagagaaaagagagaaaaagacacacaccaagacccgcagcaggagacagaccagggaacagagcagggacaggcgacgggacccacaggcagggagccaaggcgagggaggagagagacccgcccagaagaggacacgaagagcaagaagacacagaaagacaggggacagaaggagggagacgcccacggaagagccccagagcacgggaagccccagcccccaccagaggaggaagaggcaagggagcagcagaggaaacaggagagcagaggcaggcacaggggccggggcagccccaggaaagaagaagggcaaggcacaagggggaagggcccaggcaaggcaaggccggggggggggggggggaaccannnnnnnnnnnnnnnnnnnnnnnnnnnnnnnnnnnnnnnnnnnnnnnnnnnnnnnnnnnnnnnnnnnnnnnnnnnnnnnnnnnnnnnnnnnnnnnnnnnnaaggaccaagggaccagaaccagaaaaccgagggagcggcaaaagagcagcacaccaggcgagcaggagaggcaggagaacccgaagccccgcaggccagcaccagggcaaaaccaagagacccgcccaggcaaggggaaagagagggcaacagggagggcccggcaccaagcccgggcacgcacacagaccggcagcacacacaagggcacacacagaacagaccggacacaggcacacacacacaacaacaacaacaacaacagcacaacacaagaacaacacagcagcacagagaggagggggaggacagggcggggagaggagaggaagcggagcccaagcagaacaccccccaggccgaagaggcagaaccccaggaggaagagggcccaccccaggaagggaccgacagagaccaagggggccgaccagagcccagacaggaggggcgagccacgagcacaggcggacaaaacgcccccgggcaacagcagggccggaccacacgcgggcagcggcgcccaaaagcacaggcgcccccccccccgccaggccagaagagaaagccggcccagcagccgccacgagcggcagcgcggcggcgcagaaaacagcagcaggaggaggcaagcggcaggcggccccgaggggaacgcacgcggccgaaaacaggaagggaaccacgcgcaagaaggcccaggagcagccgccccaggacagggaaggccagggggccccacgaacaggggccacagagccccccggccggcgcccccccccccccggagaagacaggagaacgagacaaaccaaacaggaacaaacacaaagcaccagaaagcccaaccccccccgcccgcccccacccacccacccgccggcccggcaccccgacgggaagggccaaaggcaaaccaaggggcccccccaggacggcgacaggccaccgcacaagcagcagagaagagccggggcacggagcaaggcccaccaaggggcagacccccagcccggggcccagccccagggcccggccaccaagaagacggagcaccaccgagcaggcacggcaagcccacacgagacagcaaacagggcccagaaaaccggcaagacacgaaggagaacacagggaaaggcggggggaaacggagaagccaggaagaggacgccgcaggcgaaacccgcacagaggccccgcagaacggccagcgagaggcacggggaaggggccccccggaggccccagcacggcaaagaccaacaaggcaccaggacgcaacgaaacaccggcgcccacggcccaacgggcggggagccgaaccccgagggagagaaacagcgaaaaaaggaggagcagagcggggagagggagcgggaggaggaacgcccccaggccacgggaacagcccggagaggacgacgggaaagggaaccaggaagggaccggcagagaaaagagcacgaggcgggccgaggaaacccagcaccacccgaggccagccagggaccggcggcccgcccaacccaaccccagcccgcaggacaaccacaacaaaggcccggccccagacgcgagccagaaaagcccgcccagggagcagcaggaagaaagcacggcggccacacaggggacgagcgagggacagcaagccgccaaacccaaaggcagcacacaagggcaccccggccagaacgaaccggcaaaagccccccagacagagggcgccaggaagccagagcccccacgggcccagcccccgaacacacacccacgggcagcaggcccacccccgagaccacgcgcggaaccaggggggcagccaacaaccaccacacacgacaaaaggcacagggaccgccgggaaaagccagccgggggggcagcgccaagaagcaaacaaagagacaagggacaggagcaagggacggggagacacaccaggggaagcccggccaaggagaggccagggcaggcacccaggcgaaggagcagccacccccaaaacgcgagggggggccccacccgcgcccaagaaggcaaggacacggagacaagaggaccacggaggcccgaggggcgagagcaccccggggcggcacgggaagagggacgacagaaccaaggcaaagccgagcagcagagagccaccaggggaggaaaccggggggggcgcaaggcaggaagaccaaaacgggaagacgggagcgggaggcgaccggcagccgggcagaggaaccaggcagacagacgggggggggagcagcccgcagcccagcgggagcgaacgggccaaccaggcacccaacacccaacagcccacagaagaaaacccagcacgaagggaacaaccccaggcaagggaccccgccgccccagcgcagaggagcgaggggcgaaagacccagccagcaggggagaaacaaacgggcgggcccgggaggcaggccaaggaagggcgccaacagcccggcccagggagggcccaagcaggcgccagcgccagaaccaggggggcgaagcaagggccgggaaagagagaagaaacaggcacccacacccaggcacgggagccacacacagacacaccccgaccgacagccccccccaggggaaagcgacaagagaaaagcacgcgggagccaggagaacccagcgaccagccacagccaggagagccaccggagagccccaacagggcagcgacaaggaacaacaggcaaagcagaggaccccggccaagggggaagcacgcaccgaagggaagaagaaaggaaaaaaacaggccacacaaaaggcaaaagaccggagggaggccggcacaaaagcgcgggggaccggggaaagaaagagaggagcaggccaagagccgccgcaccagagaaggccaggagagccggcccggcagccccacaacccgcacccgcgcaggcgccccaaggaaaacagccagggcaggagggaaaaagcaaggggggcaccagccacccccagaaggcacgacgcgagagaacagcccagccagcccaagcaggaaagggcgcacgagagggagagccgggagcgggcaggagagcggagcacgaagggaccgggagagagcgagaacccaagcacaccgccagaccccccccaccccaccccccggcgccgggcgaaggaggcacgaaccggccaaacggcaccgggcccaaacaaggaaagagggagggaaccgaagcccaaaacggagcccaacgaacccgccaagaagcgcggggccggaggaggaggccaacgacagcgcgcggggaggaaggcaaaaggacccgggaccagagacaccagcccaaacacgacgagaagggagaacggagcccacggcagaccccagaaagggagccggcagagcccaagggggggaggagcaggaaagaggaacgagacggggaggccaaaaagcacgcggccagaccagaagaagcgccacacacaccacagcaccagagcaggagggccaggcgcaagacccccaggacagggagccggcacgaacacaggcgcgggacacaacaagacacgagcccagacgcaccagccaacgcaggccccgagaccaccaagccgcagaacggggaaccccaccacgcggaggccgaggaaaggaaccccgggggcccaggcaagccggagaagccgccaccagccccaggacaccccaaaaccaagccaagagggaagccaaggcaccggagcacaaagccaaaaagcaggagcgaggaaagagaaagccgagaggcacaggaacaaacgacgagaaccgaaagccagggcacacaccaacagggaagggaagcgccacaaacagagcccacaggccccaccacgccccccaccaccgcgggaaggaccaacgcaggaggggagagaaaggaaggagggagggcgccaaggcccagcaccgaccaccggcgccgccccaacccaaccccacaccagcagccgaggagcggagcagcgcaaggggaggagaccgcgacgggaccaagaaacacaccgagacacacccagaacccccccgggacaggagaacaaaagaggagagcgacaggaggagaccccgaagagccacacggcacgggcacacaggagcacggccgcagccaggaggcccccacagcccccacaccacagacaaaggggcggaaggagggggggcagaggcacgccacaccagggccccaccagaggaaaacagcacacccagggagagacaacaaggggagggaacgggccagggaagcacagcacaggcacgaccaggccgacgggagggcccannnnnnnnnnnnnnnnnnnnnnnnnnnnnnnnnnnnnnnnnnnnnnnnnnnnnnnnnnnnnnnnnnnnnnnnnnnnnnnnnnnnnnnnnnnnnnnnnnnnagggggaggagggaggagggaggggcggggaaaggggaacaaggccaggggaggaacaggcagagagcgggccagcagggcagcaggcaaagaccgacggcaaagcacaaagagcccggcccaaggggaaaaacaggcccagccggacacaaaccacagggcgggccagccggaggacgagagcacagggaggagccggccaggacccggggccgcgccacacaaccggccacagacaacccgggaggcaggcaccagcccccacccccccagcgcgggccagcaacggcccccccgagcaacagaggccagcgcccggagaaggacgggccacaggcccaccagaagcacacccccagcccgcaggacaggggaggagcgcccacaggagagaacgaggccacgggccagggccacagcgccccccccccaccaacaacacgacagcagagacagaagcagcaggaggcgacggcaaaagggaggagggggggggggaggggcaaagggacacagggaaggcagaaagaaaagaaagacaggagggggaagggcagagggaaagggggagcgcagaggaaacccaggggcaccgagaaaaaaggaagagcagggggggacggggccaggacaagcgggaacaaaccccgagaggagaggggggaggaggcaaggcccggggcacccgcaaggaggaccccacaggacccagagaaaaagagggccgggggcccagcggccagaggagcacgccgcaaaccgcccgccagagggcgaggcagaggaggcgcaagaacagaagccccacacccacgggcccgccacccagccggcgacggaacgccgggcgacaggccccccgcaggcaccaaagggcggcccccgcccaggaccagaaacggggaacccgcagcgaccagacacacgagaacaacgacgaaaggaagaggaccaggccgggaccagcagcaacaaagccagagccacgggacacggccaggcccaccagaaggagcgacaccagggccgcagaacagcgcagaaccccgcgggaagaggccacaggaccgggaccccaaggagggaggccagccgagcagcaggggacaacggcgacgcgccacgaaagaaggacccaggaggcgcccggagaggaggcgaagccaccacagcacgcccaaggaagagaaagggaaccaggagcgagcccacccccccaagcaccggaggacaagacacgggggcacagggcgcagaaggccagcagggcggcaacccaagaagacccgcaaggaggacccagcccaggccacaaggccaggaggagccacccagaggggccaaagcagccaagggaaaggcagaggcgacagcccaccgcgaggaccacccccgcccgggcagaggaggcaggccaggggccaaaacacacacgcccggcagacccgccgccccgggagcagagaacgggaggggggcccccaagcccgcacacgagacccgccgccacggacgccaagggcaccagcagcgcgggacaacgggcgcccacaccgcccaggagcccggggggggcacaaggggcccggcaggcagcaggccacagaacaccccagaccaggagacgagaaccaaaggaagggccaaacaccccacccaggaggggcgacacagggcccaccagacccgcccggcaaaagaacaagggcagcaggcagagccccagccagcagcgggaccaggcgggggagcacaaacccagagccaccaggcccggggggggcccagccgcggccggaagcggcagaaaccccaccacccccagcggacacggaagggagagagaggagaggcagaggaaacgggggggagccacgaccacgcccagagcccgcgcaggaaaacgcagggccagcggggcgagcccaagccggaggagaggcgcgcgggccacccagggaggcacaaaggaaggagacaggccgacgccccagccgaccacaccagggaaaggaaagaacacacgccacagaggcacagccggccggggacaaggacggcaagcaccacgcggaagcaaaacagcggggccaaaccgcaccgagcaggcgccgagcggcagccgcagcgccaggcggcacagggccaccaagcacccacaggagacggacaagggccgggggcccggaccagacccagcggcaggggccacgaggacaggagggggaggggaaccagacaacacccaaaccagaccaggccccccccccgaaagacgggagaaagaggaccccgggcagcgagccggggcgcgcccccccccggccgcacccaagagcagaaaggaaccaagccccaacagccccagaaaaccgaaagggcaagaaggccccagcgacccgcaaggcaagagaacggcccggcccggcccggaggagcgccggggaagggcaggcccaccgcccaggcacgcgaggaagagaggaacgggcgcaccacggaacaacccggccaaagggcgcgcgcccgaaagagccacagccaggaggcgccaaggcacaagcaaaccgaacaagagaacccgcgagcgccgcagagagggcaccggaggcgagaagacacgaagaacccaagggcccacgaggagaaagacgcaccacgcagagagaacaacagagagagaaagaaaaccccagcaagaggaacgaaagccacgccccccgaggagagcggaggacaccagggagcaaaaagccggagagcagccacaaagcagcggcaaaggagggcagcacccgggccagcacagaaggaaggagcacacgccgaaaagaggagagagccccacaaagggcccaccgccgcggcggccaacagcaccacgggacgggagcagcgccgaggcacaagaccacaggaagcaaaaccaagggagcgccacggaccacgaagcaggagcaaaaggcaagaggccaaaagagaggcgaaagagaccagaacagggcgccccacccagaccgccaccagcagcagggaaaagacagccgaaaaccggggaggcgcggacccgaacaaaccacccccaagaagaggcccgacgcagagagggcccagccaagcccaaggcccccgaagagccgcgccagagagcacaggacgcgcgagcacgagaggcaggcgccagcacgccgccacgcaaggacgccccccacgcagagcacagagggccaggggcacaacgcccccaccccccccaggccgcggcaggagcccaggcccggcgggcagcgcaggccaagcccggaagccaagagccaaaccccaccagcgaaaaaaccccagggaaaacaccggcaagggaaaagacaacaaagggcgggcccgggggccaccgggacacaaacgcgcgcagcacacagccaaggacccccacaggcccccaggccccccaagccaagaggaaggcacagccacccacagagcacaaaacccgaccggaaggcaaagagaggcaaaaggagaccggccgaaggggcggcaggcacccgggaagacaggagagagcacacagacagaaaccccaaacagggggcaaaaacccgagcacaaacgaaaacccgaagacaagaggggacggcaacgcccggaggaaggcagagggccaccccaaaagccaggggaggagaccaagagagaaagcagagagggacgcaagcgccgaaccagcaaagaggcccaggcagccaggacgcacccaagggggggcccggggaaacagcccccccaaagcagcgaccgagaaccccacgcaaaccggcaggaccccaaaaaaccagcccaccaaagaaaagggaaacagacaacggcccacagaccccggggcgaacaaagggggcccggggaaaggccacacagacacaacaaggacgagaggagagagaggacaacaggccaccccaggcaaagcaagcaaaccacacgcccc

SEQ ID NO: 638 - RNA, 570 nt, Mus musculus
caggaccacacggaccaagacccaggagggaacacaaccgccaggagcggcgaacaccagaacgggaccgccgcaagaagagagcgccgcagagaaaccgcccacgaaacaaggagaggcgacccccaggcgccaagaggcaacagagcaccgaagaacaagccaacaggacaacaaaacagcagccagagaaccagaggcgaaaggcaaacgaagaaccacaacagaaacaagaccaccaccacacagaacgcagcaccccaccccaccagccgggcaccccaacacaaccgaaaacagacccagaaaaaacaccagagagaagaggacacaagaaggaccaaagcacaaagaacaggagagcacgcaaagagacaggccaaagaaaagcaggaaacacagccaaacagggaggaaagaacagagccacagaacaaaggggaagagacacaaaaagaaaacccaaagcgaggcaacgcggagaagaaacccaggaaagagacggaaccaagagcgagcacagcaacagaaacaagaaaggaagagagaaccagggcagaagaccaagag

SEQ ID NO: 639 - RNA, 4999 nt, Mus musculus
caggcccccccggacacacggcgcgagccacccccacccggaaaggaggggcacacaccaaggggcgccacccagggaggacagcaccagccacccccaggggaagcaaaccacggccagacgagacaaaagagacaagccaaaccaccccaacacagcacaagaggggcccagggggaaaacaacaaaacaaacaagaaaaaccagaaagcaacagcgaaggagcgagcgaggcgcacgcccagggagaggcagacgagcgcacaacgggaaagaaggggcccaagccgaggagggcagcaagcagcgccgggggcgaaagcagcggcaacggaggacccgaaaagacgacagcggggagaaagaggagaagcaaggaagcaaaagggccaaaaggaccagaaacgaaaaggggacccaaagagagcagaaaaaccacaaaagaacacgcccagagccagaaaggagccaaagcccgccacaggcaggaagagaggagacagaaaaaccaaccccccaaaaagggaccacccaccacacgcaacccccgcaccccaaaacaacacaggcacgggggaggccgagggagggccgggcgggcacggaggaccgcagcaaacaaggaggaagagaggcccacagggggcggagaggggagccccacaggggaggggaggggacgggggaagagcagcaaggaggagcagggaagggcccgaggggccgcaaagagaggggccgagccccccccccccccagcaccacacgccaggacagagaagagaccaccacacgcagccgacaagaggaagaaagggccacaagagcaggcagcagaaccccagcaaaaaaggccaagagaggcccgagcagaaacaaaagggagagagaccgcagcagacaggccccgaagccccggaaagccaggcaaccggcgggagacagggcccgaagcccggcgccggaaccacgagaccaggcggcccgaaccagaaaccgccgcccgcccccgagggggaaaaggcggcgccaccacgcccggccaggcaaccaggggccacggggcggaggacgccccgcccacgcggagaagagacaagcggggccgcagcacaagacccccaacccccccaacacccacacccagcagggaagggagggggcccaaacgggcaacggagcaacgcgaacccagcacgggaagcgagacggaagagggcagagaggccagccgggccacgggagacagccagccccccccgcccgccaacagaacaacccaaggcaaacacgagcccaccgccgaccccccccaccagccccccaaggcccgagacaaaaggcaaaaaaaccaaggacggaaagccacaaggaccggaaaaggccacgggggaagaaaaggggagagcggcacggggcgcgggagaaggccgcagagaacaggaaggacagcagggggacagaccgcccacccgccaccccaggaaagaccccaagcacacccagggagccaagggcacagccgcagaggggagaacaagagcgccgagaccccaggacgcagccagggaagccccaccacgagcacagccaccacgaggagaacaaaagagaagagagcgccgaaaggacaaagaaaggggcagaggaaggggaagcccggggagagggcgagagcggaccccagcggaccgccagaggagaggggggggggggggcgcacacacacacggggggggggggcaggcaacccacagggagagaagcaagaagaaacagaagaacaaaacaccagcgacaccagggaggacaggcaggccgaccgccccccgggggcacggccgcaggaggcacgaaccagccagccacaccggccagcacaccccggggagcgaacacaacccccacaacaccgaagcacccagggaaagagcgcccgaaccacagagggaagggggaggaagagacccagcgccccgagaaaaaacaggacgagcggcggaggcgggcgggcaagcgcaaggcgggggcagaagggaaccccaggaggcaggagccaggacgcaccggacaacaaccaccagaacgaggagcccaagcagcaacccgcgagaaacagcagcggggggcacaaggccaaccaagcacagggaggaggaggaccaagagcaaggcaacccaacaaaagaaaccaagagcccgacagagacacacacaaacaaacaaaaaaaggggcggagagagaggagcagcaccgggccagaggaccagggcagggccagcaccacaggcgacacagcacaaagccagccagggacgacaccaccccggcaccagaaaagcacaaacaggcaggcaaacacccaggacaaaaaaaagaagaaaaaaaaagaacaaaacaagaaaacacagcaaggacaagcagcccccccaccccaccacccaagacaacaacaaaaacaaaagcaaaaacagcaccgggggccaccaacacagacaaggaggcggcacaccgggaccccggaacccaaaagacaaaggccaaagacgcgagaaggaggccagacagagcagcacgaacaggagacgaaagaacgcaaagagaggggggagcggccaggcccagagacgcgcccggaggacccaggacgagcccagcccacacggcagccacgaccaccgaaccccaccaagggacagacaccaccggcccgggcaccagacaagcaggggccagaacacccaggcaaaccacaaaacgaaagcaccaagcaggaaagaccccaccggacccagacacagcagcgagcagcaggagcccaagccccacaccgcgaacaagcgccgcaaacgccccacaaggccagacccaccgccagcagagccacgcaaccaaaacccaagaacaccaggggaaggccgagcagcggcccccaccacggggggagaaccggaagagcggcagagcaaagaccaacgagagcccagccccgcgcagacagagggcaaccgccacacgggacgaagaaagacacaagggagccaaaacaaaaaaaagggaacccacgaagaccagaaagagcccaacacaagggcgcacggaagccaacaaaaacagggccaggaagaacgaaaccggcaagcagacccggagaaagcaaaccaccaggcagacgaccacacgccccccaccaaaaagaaaaacaaccagaccccggagccggaccagcgaaagacaaaagaggccagcggccacacggaaagagaggcccaggacgcaaacaagccccagacaggggaacgccagggccaaaaaggggaggggggagggagggggacgggaagcaggaaagaaagaggaaaagccaaaaaaaaaaaaaaaaaaaagggaacaaaggcaccagggcgagcagcaggagggaagacccggaacggagacagagggagcgccagggggcgggaagaaccgggcccggaagagcagccaggcccaagcacgagccacccgagcccgacacggacccaacagccagcaacaaagccaagaaaacaacagcgagacaggcacacagaaaagcagcacaacccagacggggccacaacaacaaaggcaaacccacaaaaaaaacacggggcacaaacccgagccgaaggcaaacagaaaaagccaaagggccaagcaaccagcagcaaaggaaagccaccagaagggggcaggggaagagaggaagaaggaccgccccaaggcaaaagcaaagcaaggcagcaaaccgagccaccacagcacgacgcgcgcagagcaaaagggaaggcgacaagaaaaggggaagcgaacggagaacaggaagaccaggccacccagaagagcaggggaacaccacaccggccgaaacagggccaggaggggacagcaacccagcacgggaggcaaggaaggagccgggagagacagcggcacaaggaacaggacaggccagcacagaaagggagaaccggccaaaaaaaaaaaaaagcaaggacaggagaacaccaaaaaaagcaagaaaagaacaaagcaaaaaagaaagagaaagacccgaggagagacccacagaccacaagagcacgaacccgcgcaggagggcaaaaagaagcaaccaaagaaaaagcacaaaaaaaaccaggccacccacgaacagacaggcaagacaacaccacagagaaacagcacacaaacagggacaaaacccaacaaacaaaccaaaaacaacaacagcaggggggcaccacggagaggcgaggcaggagaagccagaggcaaacagccggaacacagaacgccaaaaaacaaagggagccggcaggggacaccaacccacaagggcagaggcaggccgaccaaacaggagcgccgagccaggccagcaggggacaaggagacccgcaaacagaacagaacagacaaaaccaaccaaaaacgggcaagaggggggccagcaggaaaggacaaccccacaaccggaaggcgagccagacccagcaaaggggaaggaaagaaggacgaaaggggaagacacaacaccacacacacacacacacacacacacaacccagaagagaaaacaaaaccaagcagcagaagcagaaaggagccaagaacaagccgcaggacggcagagagaccacacccaacgggaggccggcaacacagccgccaagaaccccccccacccaaagaacaacacagaagccagcacaaacagaaaaaaagcccgagggcaaaagcggaagaagggcaccccagaaagacccagcaacgagcagcggagacgagcggaccgccagcggcagaaagagaaacaaagaccccacgcacgcaccccaggcggcgcaaagaagaagcccaaggcacagaccccgaggccaaggaccccccccacccagaggcccccacagagcaggcggcccaccgcggaagaacgcccgaccccgaaacaggaccacagccgaaccaccagcc

SEQ ID NO: 640 - RNA, 48440 nt, Mus musculus
  misc_feature (1047)..(1146): n is a, c, g, or u
  misc_feature (2002)..(21185): n is a, c, g, or u
  misc_feature (22046)..(22145): n is a, c, g, or u
  misc_feature (44731)..(44830): n is a, c, g, or u
  misc_feature (46642)..(46779): n is a, c, g, or u
gaggggaggcacaggagggcagagggggagaggaggaagaggggggggacggcagcgaacggggggggggagaggggaggggggacggggaggcacaaagccagacgggagggcagagggacagccagacaacaggggacacgggggggagaggggcagcacgcagaggagcggggacagcaggggaggagccaggggggcagcaggcagagcaggcagggaagcaccaggcaagcaggcaggcagaagggcggaccggcggcaggcagggacaggacggcaggaagaagggagagaaagggggcgggggacagggcaggcaggagccgggggcacgagggacccggaaccagggacgccggaaagacagggaggggggggaacagagcaccccgccccaagccccaaggcagagaggggaaacgcgagcaaggcacgccaacggagaaaaacccgaggaagcaaaaaaagaaaagggacggggccggacaagcgcaggccaggagcgcccaggcgggcgggggcgacgcacaaaggaagcacacgcaaaagagaggacaggagcgggccggagagcagggccggaccacagccccacaggggcgccacaaccaacccacagggccaccaaccgcgaccaggagaaccaagcggaacacaggccgaaaaggaaccaaccaagaaacacggcaagggaaggaccgacccagagggccacaaaacaagaaaggcaagaaacagggagacaacccagggcaaaacagacccaaccacagggcaccccagccacacccgaagggcaccggccacacggcggggagagaaagaagagcccgggccagcggccaaaaaccacaccccgccaaaggcccaggggaagacccaccagcacgcaaggcgcaggaaggccagaggcccagaggcaaaccaaccgagacagacgcagaaaccaacgcgagaaggcggcacaaagagcacaaaaagcaaaggaagcaaagaccgaaaagaggaaaacaagcaaaacggggggagggggggggggggggnnnnnnnnnnnnnnnnnnnnnnnnnnnnnnnnnnnnnnnnnnnnnnnnnnnnnnnnnnnnnnnnnnnnnnnnnnnnnnnnnnnnnnnnnnnnnnnnnnnnagggaagacaccagaaaagaggacgaaagcagaaagggaaggacccagcggggagaggaggggacaagagagcagccaacagggaaaaccccaaagacaaagcacagacgagcaccgccaggcagccggaccacggcaagaagcaaaaaaacacacgacaaaaagaaggccagagcaagcagagggaagaaagaaggagagggggacaacgagagcaggaaccgacccagacacaacagcgcggcgccggcggagcccgggggcggcccaacccaccaaaagaacaaccaaaaaggaaaagagagaaaccacagcaagaagagccggcggagccaccccccagggacaaagagacccagacaggcggaacaagccgcacacgcccgggcaccaggagggcccagcccccggggcccccgaaaagccagcggacacaggagacagcaggcacccacagcacggagcaacggccggaagcacaaagaaaacacgaaaggcaggaggaccgggaagacccagggcagcaaacaaggaaggagacggaacgagcccaggccagagccacaggcaccaagcagaccaggcacggggcacagacgcccacacacggggggaaagcaaagcaggcaacacacacacgaggagggaacaaagggaccggagaggcgagccgacaggccacgcccaccaccgacagagcacccaggaagcggagcagagaacgcacaggaaaagcagggcggaaggacaccagcacgcaggaagcgaaaaacaaggagggaagaaagaaggaagaagaaaccagaaaaagggaagaagggagcaagaaaggaagggaagaaaggaagaagggcgnnnnnnnnnnnnnnnnnnnnnnnnnnnnnnnnnnnnnnnnnnnnnnnnnnnnnnnnnnnnnnnnnnnnnnnnnnnnnnnnnnnnnnnnnnnnnnnnnnnnnnnnnnnnnnnnnnnnnnnnnnnnnnnnnnnnnnnnnnnnnnnnnnnnnnnnnnnnnnnnnnnnnnnnnnnnnnnnnnnnnnnnnnnnnnnnnnnnnnnnnnnnnnnnnnnnnnnnnnnnnnnnnnnnnnnnnnnnnnnnnnnnnnnnnnnnnnnnnnnnnnnnnnnnnnnnnnnnnnnnnnnnnnnnnnnnnnnnnnnnnnnnnnnnnnnnnnnnnnnnnnnnnnnnnnnnnnnnnnnnnnnnnnnnnnnnnnnnnnnnnnnnnnnnnnnnnnnnnnnnnnnnnnnnnnnnnnnnnnnnnnnnnnnnnnnnnnnnnnnnnnnnnnnnnnnnnnnnnnnnnnnnnnnnnnnnnnnnnnnnnnnnnnnnnnnnnnnnnnnnnnnnnnnnnnnnnnnnnnnnnnnnnnnnnnnnnnnnnnnnnnnnnnnnnnnnnnnnnnnnnnnnnnnnnnnnnnnnnnnnnnnnnnnnnnnnnnnnnnnnnnnnnnnnnnnnnnnnnnnnnnnnnnnnnnnnnnnnnnnnnnnnnnnnnnnnnnnnnnnnnnnnnnnnnnnnnnnnnnnnnnnnnnnnnnnnnnnnnnnnnnnnnnnnnnnnnnnnnnnnnnnnnnnnnnnnnnnnnnnnnnnnnnnnnnnnnnnnnnnnnnnnnnnnnnnnnnnnnnnnnnnnnnnnnnnnnnnnnnnnnnnnnnnnnnnnnnnnnnnnnnnnnnnnnnnnnnnnnnnnnnnnnnnnnnnnnnnnnnnnnnnnnnnnnnnnnnnnnnnnnnnnnnnnnnnnnnnnnnnnnnnnnnnnnnnnnnnnnnnnnnnnnnnnnnnnnnnnnnnnnnnnnnnnnnnnnnnnnnnnnnnnnnnnnnnnnnnnnnnnnnnnnnnnnnnnnnnnnnnnnnnnnnnnnnnnnnnnnnnnnnnnnnnnnnnnnnnnnnnnnnnnnnnnnnnnnnnnnnnnnnnnnnnnnnnnnnnnnnnnnnnnnnnnnnnnnnnnnnnnnnnnnnnnnnnnnnnnnnnnnnnnnnnnnnnnnnnnnnnnnnnnnnnnnnnnnnnnnnnnnnnnnnnnnnnnnnnnnnnnnnnnnnnnnnnnnnnnnnnnnnnnnnnnnnnnnnnnnnnnnnnnnnnnnnnnnnnnnnnnnnnnnnnnnnnnnnnnnnnnnnnnnnnnnnnnnnnnnnnnnnnnnnnnnnnnnnnnnnnnnnnnnnnnnnnnnnnnnnnnnnnnnnnnnnnnnnnnnnnnnnnnnnnnnnnnnnnnnnnnnnnnnnnnnnnnnnnnnnnnnnnnnnnnnnnnnnnnnnnnnnnnnnnnnnnnnnnnnnnnnnnnnnnnnnnnnnnnnnnnnnnnnnnnnnnnnnnnnnnnnnnnnnnnnnnnnnnnnnnnnnnnnnnnnnnnnnnnnnnnnnnnnnnnnnnnnnnnnnnnnnnnnnnnnnnnnnnnnnnnnnnnnnnnnnnnnnnnnnnnnnnnnnnnnnnnnnnnnnnnnnnnnnnnnnnnnnnnnnnnnnnnnnnnnnnnnnnnnnnnnnnnnnnnnnnnnnnnnnnnnnnnnnnnnnnnnnnnnnnnnnnnnnnnnnnnnnnnnnnnnnnnnnnnnnnnnnnnnnnnnnnnnnnnnnnnnnnnnnnnnnnnnnnnnnnnnnnnnnnnnnnnnnnnnnnnnnnnnnnnnnnnnnnnnnnnnnnnnnnnnnnnnnnnnnnnnnnnnnnnnnnnnnnnnnnnnnnnnnnnnnnnnnnnnnnnnnnnnnnnnnnnnnnnnnnnnnnnnnnnnnnnnnnnnnnnnnnnnnnnnnnnnnnnnnnnnnnnnnnnnnnnnnnnnnnnnnnnnnnnnnnnnnnnnnnnnnnnnnnnnnnnnnnnnnnnnnnnnnnnnnnnnnnnnnnnnnnnnnnnnnnnnnnnnnnnnnnnnnnnnnnnnnnnnnnnnnnnnnnnnnnnnnnnnnnnnnnnnnnnnnnnnnnnnnnnnnnnnnnnnnnnnnnnnnnnnnnnnnnnnnnnnnnnnnnnnnnnnnnnnnnnnnnnnnnnnnnnnnnnnnnnnnnnnnnnnnnnnnnnnnnnnnnnnnnnnnnnnnnnnnnnnnnnnnnnnnnnnnnnnnnnnnnnnnnnnnnnnnnnnnnnnnnnnnnnnnnnnnnnnnnnnnnnnnnnnnnnnnnnnnnnnnnnnnnnnnnnnnnnnnnnnnnnnnnnnnnnnnnnnnnnnnnnnnnnnnnnnnnnnnnnnnnnnnnnnnnnnnnnnnnnnnnnnnnnnnnnnnnnnnnnnnnnnnnnnnnnnnnnnnnnnnnnnnnnnnnnnnnnnnnnnnnnnnnnnnnnnnnnnnnnnnnnnnnnnnnnnnnnnnnnnnnnnnnnnnnnnnnnnnnnnnnnnnnnnnnnnnnnnnnnnnnnnnnnnnnnnnnnnnnnnnnnnnnnnnnnnnnnnnnnnnnnnnnnnnnnnnnnnnnnnnnnnnnnnnnnnnnnnnnnnnnnnnnnnnnnnnnnnnnnnnnnnnnnnnnnnnnnnnnnnnnnnnnnnnnnnnnnnnnnnnnnnnnnnnnnnnnnnnnnnnnnnnnnnnnnnnnnnnnnnnnnnnnnnnnnnnnnnnnnnnnnnnnnnnnnnnnnnnnnnnnnnnnnnnnnnnnnnnnnnnnnnnnnnnnnnnnnnnnnnnnnnnnnnnnnnnnnnnnnnnnnnnnnnnnnnnnnnnnnnnnnnnnnnnnnnnnnnnnnnnnnnnnnnnnnnnnnnnnnnnnnnnnnnnnnnnnnnnnnnnnnnnnnnnnnnnnnnnnnnnnnnnnnnnnnnnnnnnnnnnnnnnnnnnnnnnnnnnnnnnnnnnnnnnnnnnnnnnnnnnnnnnnnnnnnnnnnnnnnnnnnnnnnnnnnnnnnnnnnnnnnnnnnnnnnnnnnnnnnnnnnnnnnnnnnnnnnnnnnnnnnnnnnnnnnnnnnnnnnnnnnnnnnnnnnnnnnnnnnnnnnnnnnnnnnnnnnnnnnnnnnnnnnnnnnnnnnnnnnnnnnnnnnnnnnnnnnnnnnnnnnnnnnnnnnnnnnnnnnnnnnnnnnnnnnnnnnnnnnnnnnnnnnnnnnnnnnnnnnnnnnnnnnnnnnnnnnnnnnnnnnnnnnnnnnnnnnnnnnnnnnnnnnnnnnnnnnnnnnnnnnnnnnnnnnnnnnnnnnnnnnnnnnnnnnnnnnnnnnnnnnnnnnnnnnnnnnnnnnnnnnnnnnnnnnnnnnnnnnnnnnnnnnnnnnnnnnnnnnnnnnnnnnnnnnnnnnnnnnnnnnnnnnnnnnnnnnnnnnnnnnnnnnnnnnnnnnnnnnnnnnnnnnnnnnnnnnnnnnnnnnnnnnnnnnnnnnnnnnnnnnnnnnnnnnnnnnnnnnnnnnnnnnnnnnnnnnnnnnnnnnnnnnnnnnnnnnnnnnnnnnnnnnnnnnnnnnnnnnnnnnnnnnnnnnnnnnnnnnnnnnnnnnnnnnnnnnnnnnnnnnnnnnnnnnnnnnnnnnnnnnnnnnnnnnnnnnnnnnnnnnnnnnnnnnnnnnnnnnnnnnnnnnnnnnnnnnnnnnnnnnnnnnnnnnnnnnnnnnnnnnnnnnnnnnnnnnnnnnnnnnnnnnnnnnnnnnnnnnnnnnnnnnnnnnnnnnnnnnnnnnnnnnnnnnnnnnnnnnnnnnnnnnnnnnnnnnnnnnnnnnnnnnnnnnnnnnnnnnnnnnnnnnnnnnnnnnnnnnnnnnnnnnnnnnnnnnnnnnnnnnnnnnnnnnnnnnnnnnnnnnnnnnnnnnnnnnnnnnnnnnnnnnnnnnnnnnnnnnnnnnnnnnnnnnnnnnnnnnnnnnnnnnnnnnnnnnnnnnnnnnnnnnnnnnnnnnnnnnnnnnnnnnnnnnnnnnnnnnnnnnnnnnnnnnnnnnnnnnnnnnnnnnnnnnnnnnnnnnnnnnnnnnnnnnnnnnnnnnnnnnnnnnnnnnnnnnnnnnnnnnnnnnnnnnnnnnnnnnnnnnnnnnnnnnnnnnnnnnnnnnnnnnnnnnnnnnnnnnnnnnnnnnnnnnnnnnnnnnnnnnnnnnnnnnnnnnnnnnnnnnnnnnnnnnnnnnnnnnnnnnnnnnnnnnnnnnnnnnnnnnnnnnnnnnnnnnnnnnnnnnnnnnnnnnnnnnnnnnnnnnnnnnnnnnnnnnnnnnnnnnnnnnnnnnnnnnnnnnnnnnnnnnnnnnnnnnnnnnnnnnnnnnnnnnnnnnnnnnnnnnnnnnnnnnnnnnnnnnnnnnnnnnnnnnnnnnnnnnnnnnnnnnnnnnnnnnnnnnnnnnnnnnnnnnnnnnnnnnnnnnnnnnnnnnnnnnnnnnnnnnnnnnnnnnnnnnnnnnnnnnnnnnnnnnnnnnnnnnnnnnnnnnnnnnnnnnnnnnnnnnnnnnnnnnnnnnnnnnnnnnnnnnnnnnnnnnnnnnnnnnnnnnnnnnnnnnnnnnnnnnnnnnnnnnnnnnnnnnnnnnnnnnnnnnnnnnnnnnnnnnnnnnnnnnnnnnnnnnnnnnnnnnnnnnnnnnnnnnnnnnnnnnnnnnnnnnnnnnnnnnnnnnnnnnnnnnnnnnnnnnnnnnnnnnnnnnnnnnnnnnnnnnnnnnnnnnnnnnnnnnnnnnnnnnnnnnnnnnnnnnnnnnnnnnnnnnnnnnnnnnnnnnnnnnnnnnnnnnnnnnnnnnnnnnnnnnnnnnnnnnnnnnnnnnnnnnnnnnnnnnnnnnnnnnnnnnnnnnnnnnnnnnnnnnnnnnnnnnnnnnnnnnnnnnnnnnnnnnnnnnnnnnnnnnnnnnnnnnnnnnnnnnnnnnnnnnnnnnnnnnnnnnnnnnnnnnnnnnnnnnnnnnnnnnnnnnnnnnnnnnnnnnnnnnnnnnnnnnnnnnnnnnnnnnnnnnnnnnnnnnnnnnnnnnnnnnnnnnnnnnnnnnnnnnnnnnnnnnnnnnnnnnnnnnnnnnnnnnnnnnnnnnnnnnnnnnnnnnnnnnnnnnnnnnnnnnnnnnnnnnnnnnnnnnnnnnnnnnnnnnnnnnnnnnnnnnnnnnnnnnnnnnnnnnnnnnnnnnnnnnnnnnnnnnnnnnnnnnnnnnnnnnnnnnnnnnnnnnnnnnnnnnnnnnnnnnnnnnnnnnnnnnnnnnnnnnnnnnnnnnnnnnnnnnnnnnnnnnnnnnnnnnnnnnnnnnnnnnnnnnnnnnnnnnnnnnnnnnnnnnnnnnnnnnnnnnnnnnnnnnnnnnnnnnnnnnnnnnnnnnnnnnnnnnnnnnnnnnnnnnnnnnnnnnnnnnnnnnnnnnnnnnnnnnnnnnnnnnnnnnnnnnnnnnnnnnnnnnnnnnnnnnnnnnnnnnnnnnnnnnnnnnnnnnnnnnnnnnnnnnnnnnnnnnnnnnnnnnnnnnnnnnnnnnnnnnnnnnnnnnnnnnnnnnnnnnnnnnnnnnnnnnnnnnnnnnnnnnnnnnnnnnnnnnnnnnnnnnnnnnnnnnnnnnnnnnnnnnnnnnnnnnnnnnnnnnnnnnnnnnnnnnnnnnnnnnnnnnnnnnnnnnnnnnnnnnnnnnnnnnnnnnnnnnnnnnnnnnnnnnnnnnnnnnnnnnnnnnnnnnnnnnnnnnnnnnnnnnnnnnnnnnnnnnnnnnnnnnnnnnnnnnnnnnnnnnnnnnnnnnnnnnnnnnnnnnnnnnnnnnnnnnnnnnnnnnnnnnnnnnnnnnnnnnnnnnnnnnnnnnnnnnnnnnnnnnnnnnnnnnnnnnnnnnnnnnnnnnnnnnnnnnnnnnnnnnnnnnnnnnnnnnnnnnnnnnnnnnnnnnnnnnnnnnnnnnnnnnnnnnnnnnnnnnnnnnnnnnnnnnnnnnnnnnnnnnnnnnnnnnnnnnnnnnnnnnnnnnnnnnnnnnnnnnnnnnnnnnnnnnnnnnnnnnnnnnnnnnnnnnnnnnnnnnnnnnnnnnnnnnnnnnnnnnnnnnnnnnnnnnnnnnnnnnnnnnnnnnnnnnnnnnnnnnnnnnnnnnnnnnnnnnnnnnnnnnnnnnnnnnnnnnnnnnnnnnnnnnnnnnnnnnnnnnnnnnnnnnnnnnnnnnnnnnnnnnnnnnnnnnnnnnnnnnnnnnnnnnnnnnnnnnnnnnnnnnnnnnnnnnnnnnnnnnnnnnnnnnnnnnnnnnnnnnnnnnnnnnnnnnnnnnnnnnnnnnnnnnnnnnnnnnnnnnnnnnnnnnnnnnnnnnnnnnnnnnnnnnnnnnnnnnnnnnnnnnnnnnnnnnnnnnnnnnnnnnnnnnnnnnnnnnnnnnnnnnnnnnnnnnnnnnnnnnnnnnnnnnnnnnnnnnnnnnnnnnnnnnnnnnnnnnnnnnnnnnnnnnnnnnnnnnnnnnnnnnnnnnnnnnnnnnnnnnnnnnnnnnnnnnnnnnnnnnnnnnnnnnnnnnnnnnnnnnnnnnnnnnnnnnnnnnnnnnnnnnnnnnnnnnnnnnnnnnnnnnnnnnnnnnnnnnnnnnnnnnnnnnnnnnnnnnnnnnnnnnnnnnnnnnnnnnnnnnnnnnnnnnnnnnnnnnnnnnnnnnnnnnnnnnnnnnnnnnnnnnnnnnnnnnnnnnnnnnnnnnnnnnnnnnnnnnnnnnnnnnnnnnnnnnnnnnnnnnnnnnnnnnnnnnnnnnnnnnnnnnnnnnnnnnnnnnnnnnnnnnnnnnnnnnnnnnnnnnnnnnnnnnnnnnnnnnnnnnnnnnnnnnnnnnnnnnnnnnnnnnnnnnnnnnnnnnnnnnnnnnnnnnnnnnnnnnnnnnnnnnnnnnnnnnnnnnnnnnnnnnnnnnnnnnnnnnnnnnnnnnnnnnnnnnnnnnnnnnnnnnnnnnnnnnnnnnnnnnnnnnnnnnnnnnnnnnnnnnnnnnnnnnnnnnnnnnnnnnnnnnnnnnnnnnnnnnnnnnnnnnnnnnnnnnnnnnnnnnnnnnnnnnnnnnnnnnnnnnnnnnnnnnnnnnnnnnnnnnnnnnnnnnnnnnnnnnnnnnnnnnnnnnnnnnnnnnnnnnnnnnnnnnnnnnnnnnnnnnnnnnnnnnnnnnnnnnnnnnnnnnnnnnnnnnnnnnnnnnnnnnnnnnnnnnnnnnnnnnnnnnnnnnnnnnnnnnnnnnnnnnnnnnnnnnnnnnnnnnnnnnnnnnnnnnnnnnnnnnnnnnnnnnnnnnnnnnnnnnnnnnnnnnnnnnnnnnnnnnnnnnnnnnnnnnnnnnnnnnnnnnnnnnnnnnnnnnnnnnnnnnnnnnnnnnnnnnnnnnnnnnnnnnnnnnnnnnnnnnnnnnnnnnnnnnnnnnnnnnnnnnnnnnnnnnnnnnnnnnnnnnnnnnnnnnnnnnnnnnnnnnnnnnnnnnnnnnnnnnnnnnnnnnnnnnnnnnnnnnnnnnnnnnnnnnnnnnnnnnnnnnnnnnnnnnnnnnnnnnnnnnnnnnnnnnnnnnnnnnnnnnnnnnnnnnnnnnnnnnnnnnnnnnnnnnnnnnnnnnnnnnnnnnnnnnnnnnnnnnnnnnnnnnnnnnnnnnnnnnnnnnnnnnnnnnnnnnnnnnnnnnnnnnnnnnnnnnnnnnnnnnnnnnnnnnnnnnnnnnnnnnnnnnnnnnnnnnnnnnnnnnnnnnnnnnnnnnnnnnnnnnnnnnnnnnnnnnnnnnnnnnnnnnnnnnnnnnnnnnnnnnnnnnnnnnnnnnnnnnnnnnnnnnnnnnnnnnnnnnnnnnnnnnnnnnnnnnnnnnnnnnnnnnnnnnnnnnnnnnnnnnnnnnnnnnnnnnnnnnnnnnnnnnnnnnnnnnnnnnnnnnnnnnnnnnnnnnnnnnnnnnnnnnnnnnnnnnnnnnnnnnnnnnnnnnnnnnnnnnnnnnnnnnnnnnnnnnnnnnnnnnnnnnnnnnnnnnnnnnnnnnnnnnnnnnnnnnnnnnnnnnnnnnnnnnnnnnnnnnnnnnnnnnnnnnnnnnnnnnnnnnnnnnnnnnnnnnnnnnnnnnnnnnnnnnnnnnnnnnnnnnnnnnnnnnnnnnnnnnnnnnnnnnnnnnnnnnnnnnnnnnnnnnnnnnnnnnnnnnnnnnnnnnnnnnnnnnnnnnnnnnnnnnnnnnnnnnnnnnnnnnnnnnnnnnnnnnnnnnnnnnnnnnnnnnnnnnnnnnnnnnnnnnnnnnnnnnnnnnnnnnnnnnnnnnnnnnnnnnnnnnnnnnnnnnnnnnnnnnnnnnnnnnnnnnnnnnnnnnnnnnnnnnnnnnnnnnnnnnnnnnnnnnnnnnnnnnnnnnnnnnnnnnnnnnnnnnnnnnnnnnnnnnnnnnnnnnnnnnnnnnnnnnnnnnnnnnnnnnnnnnnnnnnnnnnnnnnnnnnnnnnnnnnnnnnnnnnnnnnnnnnnnnnnnnnnnnnnnnnnnnnnnnnnnnnnnnnnnnnnnnnnnnnnnnnnnnnnnnnnnnnnnnnnnnnnnnnnnnnnnnnnnnnnnnnnnnnnnnnnnnnnnnnnnnnnnnnnnnnnnnnnnnnnnnnnnnnnnnnnnnnnnnnnnnnnnnnnnnnnnnnnnnnnnnnnnnnnnnnnnnnnnnnnnnnnnnnnnnnnnnnnnnnnnnnnnnnnnnnnnnnnnnnnnnnnnnnnnnnnnnnnnnnnnnnnnnnnnnnnnnnnnnnnnnnnnnnnnnnnnnnnnnnnnnnnnnnnnnnnnnnnnnnnnnnnnnnnnnnnnnnnnnnnnnnnnnnnnnnnnnnnnnnnnnnnnnnnnnnnnnnnnnnnnnnnnnnnnnnnnnnnnnnnnnnnnnnnnnnnnnnnnnnnnnnnnnnnnnnnnnnnnnnnnnnnnnnnnnnnnnnnnnnnnnnnnnnnnnnnnnnnnnnnnnnnnnnnnnnnnnnnnnnnnnnnnnnnnnnnnnnnnnnnnnnnnnnnnnnnnnnnnnnnnnnnnnnnnnnnnnnnnnnnnnnnnnnnnnnnnnnnnnnnnnnnnnnnnnnnnnnnnnnnnnnnnnnnnnnnnnnnnnnnnnnnnnnnnnnnnnnnnnnnnnnnnnnnnnnnnnnnnnnnnnnnnnnnnnnnnnnnnnnnnnnnnnnnnnnnnnnnnnnnnnnnnnnnnnnnnnnnnnnnnnnnnnnnnnnnnnnnnnnnnnnnnnnnnnnnnnnnnnnnnnnnnnnnnnnnnnnnnnnnnnnnnnnnnnnnnnnnnnnnnnnnnnnnnnnnnnnnnnnnnnnnnnnnnnnnnnnnnnnnnnnnnnnnnnnnnnnnnnnnnnnnnnnnnnnnnnnnnnnnnnnnnnnnnnnnnnnnnnnnnnnnnnnnnnnnnnnnnnnnnnnnnnnnnnnnnnnnnnnnnnnnnnnnnnnnnnnnnnnnnnnnnnnnnnnnnnnnnnnnnnnnnnnnnnnnnnnnnnnnnnnnnnnnnnnnnnnnnnnnnnnnnnnnnnnnnnnnnnnnnnnnnnnnnnnnnnnnnnnnnnnnnnnnnnnnnnnnnnnnnnnnnnnnnnnnnnnnnnnnnnnnnnnnnnnnnnnnnnnnnnnnnnnnnnnnnnnnnnnnnnnnnnnnnnnnnnnnnnnnnnnnnnnnnnnnnnnnnnnnnnnnnnnnnnnnnnnnnnnnnnnnnnnnnnnnnnnnnnnnnnnnnnnnnnnnnnnnnnnnnnnnnnnnnnnnnnnnnnnnnnnnnnnnnnnnnnnnnnnnnnnnnnnnnnnnnnnnnnnnnnnnnnnnnnnnnnnnnnnnnnnnnnnnnnnnnnnnnnnnnnnnnnnnnnnnnnnnnnnnnnnnnnnnnnnnnnnnnnnnnnnnnnnnnnnnnnnnnnnnnnnnnnnnnnnnnnnnnnnnnnnnnnnnnnnnnnnnnnnnnnnnnnnnnnnnnnnnnnnnnnnnnnnnnnnnnnnnnnnnnnnnnnnnnnnnnnnnnnnnnnnnnnnnnnnnnnnnnnnnnnnnnnnnnnnnnnnnnnnnnnnnnnnnnnnnnnnnnnnnnnnnnnnnnnnnnnnnnnnnnnnnnnnnnnnnnnnnnnnnnnnnnnnnnnnnnnnnnnnnnnnnnnnnnnnnnnnnnnnnnnnnnnnnnnnnnnnnnnnnnnnnnnnnnnnnnnnnnnnnnnnnnnnnnnnnnnnnnnnnnnnnnnnnnnnnnnnnnnnnnnnnnnnnnnnnnnnnnnnnnnnnnnnnnnnnnnnnnnnnnnnnnnnnnnnnnnnnnnnnnnnnnnnnnnnnnnnnnnnnnnnnnnnnnnnnnnnnnnnnnnnnnnnnnnnnnnnnnnnnnnnnnnnnnnnnnnnnnnnnnnnnnnnnnnnnnnnnnnnnnnnnnnnnnnnnnnnnnnnnnnnnnnnnnnnnnnnnnnnnnnnnnnnnnnnnnnnnnnnnnnnnnnnnnnnnnnnnnnnnnnnnnnnnnnnnnnnnnnnnnnnnnnnnnnnnnnnnnnnnnnnnnnnnnnnnnnnnnnnnnnnnnnnnnnnnnnnnnnnnnnnnnnnnnnnnnnnnnnnnnnnnnnnnnnnnnnnnnnnnnnnnnnnnnnnnnnnnnnnnnnnnnnnnnnnnnnnnnnnnnnnnnnnnnnnnnnnnnnnnnnnnnnnnnnnnnnnnnnnnnnnnnnnnnnnnnnnnnnnnnnnnnnnnnnnnnnnnnnnnnnnnnnnnnnnnnnnnnnnnnnnnnnnnnnnnnnnnnnnnnnnnnnnnnnnnnnnnnnnnnnnnnnnnnnnnnnnnnnnnnnnnnnnnnnnnnnnnnnnnnnnnnnnnnnnnnnnnnnnnnnnnnnnnnnnnnnnnnnnnnnnnnnnnnnnnnnnnnnnnnnnnnnnnnnnnnnnnnnnnnnnnnnnnnnnnnnnnnnnnnnnnnnnnnnnnnnnnnnnnnnnnnnnnnnnnnnnnnnnnnnnnnnnnnnnnnnnnnnnnnnnnnnnnnnnnnnnnnnnnnnnnnnnnnnnnnnnnnnnnnnnnnnnnnnnnnnnnnnnnnnnnnnnnnnnnnnnnnnnnnnnnnnnnnnnnnnnnnnnnnnnnnnnnnnnnnnnnnnnnnnnnnnnnnnnnnnnnnnnnnnnnnnnnnnnnnnnnnnnnnnnnnnnnnnnnnnnnnnnnnnnnnnnnnnnnnnnnnnnnnnnnnnnnnnnnnnnnnnnnnnnnnnnnnnnnnnnnnnnnnnnnnnnnnnnnnnnnnnnnnnnnnnnnnnnnnnnnnnnnnnnnnnnnnnnnnnnnnnnnnnnnnnnnnnnnnnnnnnnnnnnnnnnnnnnnnnnnnnnnnnnnnnnnnnnnnnnnnnnnnnnnnnnnnnnnnnnnnnnnnnnnnnnnnnnnnnnnnnnnnnnnnnnnnnnnnnnnnnnnnnnnnnnnnnnnnnnnnnnnnnnnnnnnnnnnnnnnnnnnnnnnnnnnnnnnnnnnnnnnnnnnnnnnnnnnnnnnnnnnnnnnnnnnnnnnnnnnnnnnnnnnnnnnnnnnnnnnnnnnnnnnnnnnnnnnnnnnnnnnnnnnnnnnnnnnnnnnnnnnnnnnnnnnnnnnnnnnnnnnnnnnnnnnnnnnnnnnnnnnnnnnnnnnnnnnnnnnnnnnnnnnnnnnnnnnnnnnnnnnnnnnnnnnnnnnnnnnnnnnnnnnnnnnnnnnnnnnnnnnnnnnnnnnnnnnnnnnnnnnnnnnnnnnnnnnnnnnnnnnnnnnnnnnnnnnnnnnnnnnnnnnnnnnnnnnnnnnnnnnnnnnnnnnnnnnnnnnnnnnnnnnnnnnnnnnnnnnnnnnnnnnnnnnnnnnnnnnnnnnnnnnnnnnnnnnnnnnnnnnnnnnnnnnnnnnnnnnnnnnnnnnnnnnnnnnnnnnnnnnnnnnnnnnnnnnnnnnnnnnnnnnnnnnnnnnnnnnnnnnnnnnnnnnnnnnnnnnnnnnnnnnnnnnnnnnnnnnnnnnnnnnnnnnnnnnnnnnnnnnnnnnnnnnnnnnnnnnnnnnnnnnnnnnnnnnnnnnnnnnnnnnnnnnnnnnnnnnnnnnnnnnnnnnnnnnnnnnnnnnnnnnnnnnnnnnnnnnnnnnnnnnnnnnnnnnnnnnnnnnnnnnnnnnnnnnnnnnnnnnnnnnnnnnnnnnnnnnnnnnnnnnnnnnnnnnnnnnnnnnnnnnnnnnnnnnnnnnnnnnnnnnnnnnnnnnnnnnnnnnnnnnnnnnnnnnnnnnnnnnnnnnnnnnnnnnnnnnnnnnnnnnnnnnnnnnnnnnnnnnnnnnnnnnnnnnnnnnnnnnnnnnnnnnnnnnnnnnnnnnnnnnnnnnnnnnnnnnnnnnnnnnnnnnnnnnnnnnnnnnnnnnnnnnnnnnnnnnnnnnnnnnnnnnnnnnnnnnnnnnnnnnnnnnnnnnnnnnnnnnnnnnnnnnnnnnnnnnnnnnnnnnnnnnnnnnnnnnnnnnnnnnnnnnnnnnnnnnnnnnnnnnnnnnnnnnnnnnnnnnnnnnnnnnnnnnnnnnnnnnnnnnnnnnnnnnnnnnnnnnnnnnnnnnnnnnnnnnnnnnnnnnnnnnnnnnnnnnnnnnnnnnnnnnnnnnnnnnnnnnnnnnnnnnnnnnnnnnnnnnnnnnnnnnnnnnnnnnnnnnnnnnnnnnnnnnnnnnnnnnnnnnnnnnnnnnnnnnnnnnnnnnnnnnnnnnnnnnnnnnnnnnnnnnnnnnnnnnnnnnnnnnnnnnnnnnnnnnnnnnnnnnnnnnnnnnnnnnnnnnnnnnnnnnnnnnnnnnnnnnnnnnnnnnnnnnnnnnnnnnnnnnnnnnnnnnnnnnnnnnnnnnnnnnnnnnnnnnnnnnnnnnnnnnnnnnnnnnnnnnnnnnnnnnnnnnnnnnnnnnnnnnnnnnnnnnnnnnnnnnnnnnnnnnnnnnnnnnnnnnnnnnnnnnnnnnnnnnnnnnnnnnnnnnnnnnnnnnnnnnnnnnnnnnnnnnnnnnnnnnnnnnnnnnnnnnnnnnnnnnnnnnnnnnnnnnnnnnnnnnnnnnnnnnnnnnnnnnnnnnnnnnnnnnnnnnnnnnnnnnnnnnnnnnnnnnnnnnnnnnnnnnnnnnnnnnnnnnnnnnnnnnnnnnnnnnnnnnnnnnnnnnnnnnnnnnnnnnnnnnnnnnnnnnnnnnnnnnnnnnnnnnnnnnnnnnnnnnnnnnnnnnnnnnnnnnnnnnnnnnnnnnnnnnnnnnnnnnnnnnnnnnnnnnnnnnnnnnnnnnnnnnnnnnnnnnnnnnnnnnnnnnnnnnnnnnnnnnnnnnnnnnnnnnnnnnnnnnnnnnnnnnnnnnnnnnnnnnnnnnnnnnnnnnnnnnnnnnnnnnnnnnnnnnnnnnnnnnnnnnnnnnnnnnnnnnnnnnnnnnnnnnnnnnnnnnnnnnnnnnnnnnnnnnnnnnnnnnnnnnnnnnnnnnnnnnnnnnnnnnnnnnnnnnnnnnnnnnnnnnnnnnnnnnnnnnnnnnnnnnnnnnnnnnnnnnnnnnnnnnnnnnnnnnnnnnnnnnnnnnnnnnnnnnnnnnnnnnnnnnnnnnnnnnnnnnnnnnnnnnnnnnnnnnnnnnnnnnnnnnnnnnnnnnnnnnnnnnnnnnnnnnnnnnnnnnnnnnnnnnnnnnnnnnnnnnnnnnnnnnnnnnnnnnnnnnnnnnnnnnnnnnnnnnnnnnnnnnnnnnnnnnnnnnnnnnnnnnnnnnnnnnnnnnnnnnnnnnnnnnnnnnnnnnnnnnnnnnnnnnnnnnnnnnnnnnnnnnnnnnnnnnnnnnnnnnnnnnnnnnnnnnnnnnnnnnnnnnnnnnnnnnnnnnnnnnnnnnnnnnnnnnnnnnnnnnnnnnnnnnnnnnnnnnnnnnnnnnnnnnnnnnnnnnnnnnnnnnnnnnnnnnnnnnnnnnnnnnnnnnnnnnnnnnnnnnnnnnnnnnnnnnnnnnnnnnnnnnnnnnnnnnnnnnnnnnnnnnnnnnnnnnnnnnnnnnnnnnnnnnnnnnnnnnnnnnnnnnnnnnnnnnnnnnnnnnnnnnnnnnnnnnnnnnnnnnnnnnnnnnnnnnnnnnnnnnnnnnnnnnnnnnnnnnnnnnnnnnnnnnnnnnnnnnnnnnnnnnnnnnnnnnnnnnnnnnnnnnnnnnnnnnnnnnnnnnnnnnnnnnnnnnnnnnnnnnnnnnnnnnnnnnnnnnnnnnnnnnnnnnnnnnnnnnnnnnnnnnnnnnnnnnnnnnnnnnnnnnnnnnnnnnnnnnnnnnnnnnnnnnnnnnnnnnnnnnnnnnnnnnnnnnnnnnnnnnnnnnnnnnnnnnnnnnnnnnnnnnnnnnnnnnnnnnnnnnnnnnnnnnnnnnnnnnnnnnnnnnnnnnnnnnnnnnnnnnnnnnnnnnnnnnnnnnnnnnnnnnnnnnnnnnnnnnnnnnnnnnnnnnnnnnnnnnnnnnnnnnnnnnnnnnnnnnnnnnnnnnnnnnnnnnnnnnnnnnnnnnnnnnnnnnnnnnnnnnnnnnnnnnnnnnnnnnnnnnnnnnnnnnnnnnnnnnnnnnnnnnnnnnnnnnnnnnnnnnnnnnnnnnnnnnnnnnnnnnnnnnnnnnnnnnnnnnnnnnnnnnnnnnnnnnnnnnnnnnnnnnnnnnnnnnnnnnnnnnnnnnnnnnnnnnnnnnnnnnnnnnnnnnnnnnnnnnnnnnnnnnnnnnnnnnnnnnnnnnnnnnnnnnnnnnnnnnnnnnnnnnnnnnnnnnnnnnnnnnnnnnnnnnnnnnnnnnnnnnnnnnnnnnnnnnnnnnnnnnnnnnnnnnnnnnnnnnnnnnnnnnnnnnnnnnnnnnnnnnnnnnnnnnnnnnnnnnnnnnnnnnnnnnnnnnnnnnnnnnnnnnnnnnnnnnnnnnnnnnnnnnnnnnnnnnnnnnnnnnnnnnnnnnnnnnnnnnnnnnnnnnnnnnnnnnnnnnnnnnnnnnnnnnnnnnnnnnnnnnnnnnnnnnnnnnnnnnnnnnnnnnnnnnnnnnnnnnnnnnnnnnnnnnnnnnnnnnnnnnnnnnnnnnnnnnnnnnnnnnnnnnnnnnnnnnnnnnnnnnnnnnnnnnnnnnnnnnnnnnnnnnnnnnnnnnnnnnnnnnnnnnnnnnnnnnnnnnnnnnnnnnnnnnnnnnnnnnnnnnnnnnnnnnnnnnnnnnnnnnnnnnnnnnnnnnnnnnnnnnnnnnnnnnnnnnnnnnnnnnnnnnnnnnnnnnnnnnnnnnnnnnnnnnnnnnnnnnnnnnnnnnnnnnnnnnnnnnnnnnnnnnnnnnnnnnnnnnnnnnnnnnnnnnnnnnnnnnnnnnnnnnnnnnnnnnnnnnnnnnnnnnnnnnnnnnnnnnnnnnnnnnnnnnnnnnnnnnnnnnnnnnnnnnnnnnnnnnnnnnnnnnnnnnnnnnnnnnnnnnnnnnnnnnnnnnnnnnnnnnnnnnnnnnnnnnnnnnnnnnnnnnnnnnnnnnnnnnnnnnnnnnnnnnnnnnnnnnnnnnnnnnnnnnnnnnnnnnnnnnnnnnnnnnnnnnnnnnnnnnnnnnnnnnnnnnnnnnnnnnnnnnnnnnnnnnnnnnnnnnnnnnnnnnnnnnnnnnnnnnnnnnnnnnnnnnnnnnnnnnnnnnnnnnnnnnnnnnnnnnnnnnnnnnnnnnnnnnnnnnnnnnnnnnnnnnnnnnnnnnnnnnnnnnnnnnnnnnnnnnnnnnnnnnnnnnnnnnnnnnnnnnnnnnnnnnnnnnnnnnnnnnnnnnnnnnnnnnnnnnnnnnnnnnnnnnnnnnnnnnnnnnnnnnnnnnnnnnnnnnnnnnnnnnnnnnnnnnnnnnnnnnnnnnnnnnnnnnnnnnnnnnnnnnnnnnnnnnnnnnnnnnnnnnnnnnnnnnnnnnnnnnnnnnnnnnnnnnnnnnnnnnnnnnnnnnnnnnnnnnnnnnnnnnnnnnnnnnnnnnnnnnnnnnnnnnnnnnnnnnnnnnnnnnnnnnnnnnnnnnnnnnnnnnnnnnnnnnnnnnnnnnnnnnnnnnnnnnnnnnnnnnnnnnnnnnnnnnnnnnnnnnnnnnnnnnnnnnnnnnnnnnnnnnnnnnnnnnnnnnnnnnnnnnnnnnnnnnnnnnnnnnnnnnnnnnnnnnnnnnnnnnnnnnnnnnnnnnnnnnnnnnnnnnnnnnnnnnnnnnnnnnnnnnnnnnnnnnnnnnnnnnnnnnnnnnnnnnnnnnnnnnnnnnnnnnnnnnnnnnnnnnnnnnnnnnnnnnnnnnnnnnnnnnnnnnnnnnnnnnnnnnnnnnnnnnnnnnnnnnnnnnnnnnnnnnnnnnnnnnnnnnnnnnnnnnnnnnnnnnnnnnnnnnnnnnnnnnnnnnnnnnnnnnnnnnnnnnnnnnnnnnnnnnnnnnnnnnnnnnnnnnnnnnnnnnnnnnnnnnnnnnnnnnnnnnnnnnnnnnnnnnnnnnnnnnnnnnnnnnnnnnnnnnnnnnnnnnnnnnnnnnnnnnnnnnnnnnnnnnnnnnnnnnnnnnnnnnnnnnnnnnnnnnnnnnnnnnnnnnnnnnnnnnnnnnnnnnnnnnnnnnnnnnnnnnnnnnnnnnnnnnnnnnnnnnnnnnnnnnnnnnnnnnnnnnnnnnnnnnnnnnnnnnnnnnnnnnnnnnnnnnnnnnnnnnnnnnnnnnnnnnnnnnnnnnnnnnnnnnnnnnnnnnnnnnnnnnnnnnnnnnnnnnnnnnnnnnnnnnnnnnnnnnnnnnnnnnnnnnnnnnnnnnnnnnnnnnnnnnnnnnnnnnnnnnnnnnnnnnnnnnnnnnnnnnnnnnnnnnnnnnnnnnnnnnnnnnnnnnnnnnnnnnnnnnnnnnnnnnnnnnnnnnnnnnnnnnnnnnnnnnnnnnnnnnnnnnnnnnnnnnnnnnnnnnnnnnnnnnnnnnnnnnnnnnnnnnnnnnnnnnnnnnnnnnnnnnnnnnnnnnnnnnnnnnnnnnnnnnnnnnnnnnnnnnnnnnnnnnnnnnnnnnnnnnnnnnnnnnnnnnnnnnnnnnnnnnnnnnnnnnnnnnnnnnnnnnnnnnnnnnnnnnnnnnnnnnnnnnnnnnnnnnnnnnnnnnnnnnnnnnnnnnnnnnnnnnnnnnnnnnnnnnnnnnnnnnnnnnnnnnnnnnnnnnnnnnnnnnnnnnnnnnnnnnnnnnnnnnnnnnnnnnnnnnnnnnnnnnnnnnnnnnnnnnnnnnnnnnnnnnnnnnnnnnnnnnnnnnnnnnnnnnnnnnnnnnnnnnnnnnnnnnnnnnnnnnnnnnnnnnnnnnnnnnnnnnnnnnnnnnnnnnnnnnnnnnnnnnnnnnnnnnnnnnnnnnnnnnnnnnnnnnnnnnnnnnnnnnnnnnnnnnnnnnnnnnnnnnnnnnnnnnnnnnnnnnnnnnnnnnnnnnnnnnnnnnnnnnnnnnnnnnnnnnnnnnnnnnnnnnnnnnnnnnnnnnnnnnnnnnnnnnnnnnnnnnnnnnnnnnnnnnnnnnnnnnnnnnnnnnnnnnnnnnnnnnnnnnnnnnnnnnnnnnnnnnnnnnnnnnnnnnnnnnnnnnnnnnnnnnnnnnnnnnnnnnnnnnnnnnnnnnnnnnnnnnnnnnnnnnnnnnnnnnnnnnnnnnnnnnnnnnnnnnnnnnnnnnnnnnnnnnnnnnnnnnnnnnnnnnnnnnnnnnnnnnnnnnnnnnnnnnnnnnnnnnnnnnnnnnnnnnnnnnnnnnnnnnnnnnnnnnnnnnnnnnnnnnnnnnnnnnnnnnnnnnnnnnnnnnnnnnnnnnnnnnnnnnnnnnnnnnnnnnnnnnnnnnnnnnnnnnnnnnnnnnnnnnnnnnnnnnnnnnnnnnnnnnnnnnnnnnnnnnnnnnnnnnnnnnnnnnnnnnnnnnnnnnnnnnnnnnnnnnnnnnnnnnnnnnnnnnnnnnnnnnnnnnnnnnnnnnnnnnnnnnnnnnnnnnnnnnnnnnnnnnnnnnnnnnnnnnnnnnnnnnnnnnnnnnnnnnnnnnnnnnnnnnnnnnnnnnnnnnnnnnnnnnnnnnnnnnnnnnnnnnnnnnnnnnnnnnnnnnnnnnnnnnnnnnnnnnnnnnnnnnnnnnnnnnnnnnnnnnnnnnnnnnnnnnnnnnnnnnnnnnnnnnnnnnnnnnnnnnnnnnnnnnnnnnnnnnnnnnnnnnnnnnnnnnnnnnnnnnnnnnnnnnnnnnnnnnnnnnnnnnnnnnnnnnnnnnnnnnnnnnnnnnnnnnnnnnnnnnnnnnnnnnnnnnnnnnnnnnnnnnnnnnnnnnnnnnnnnnnnnnnnnnnnnnnnnnnnnnnnnnnnnnnnnnnnnnnnnnnnnnnnnnnnnnnnnnnnnnnnnnnnnnnnnnnnnnnnnnnnnnnnnnnnnnnnnnnnnnnnnnnnnnnnnnnnnnnnnnnnnnnnnnnnnnnnnnnnnnnnnnnnnnnnnnnnnnnnnnnnnnnnnnnnnnnnnnnnnnnnnnnnnnnnnnnnnnnnnnnnnnnnnnnnnnnnnnnnnnnnnnnnnnnnnnnnnnnnnnnnnnnnnnnnnnnnnnnnnnnnnnnnnnnnnnnnnnnnnnnnnnnnnnnnnnnnnnnnnnnnnnnnnnnnnnnnnnnnnnnnnnnnnnnnnnnnnnnnnnnnnnnnnnnnnnnnnnnnnnnnnnnnnnnnnnnnnnnnnnnnnnnnnnnnnnnnnnnnnnnnnnnnnnnnnnnnnnnnnnnnnnnnnnnnnnnnnnnnnnnnnnnnnnnnnnnnnnnnnnnnnnnnnnnnnnnnnnnnnnnnnnnnnnnnnnnnnnnnnnnnnnnnnnnnnnnnnnnnnnnnnnnnnnnnnnnnnnnnnnnnnnnnnnnnnnnnnnnnnnnnnnnnnnnnnnnnnnnnnnnnnnnnnnnnnnnnnnnnnnnnnnnnnnnnnnnnnnnnnnnnnnnnnnnnnnnnnnnnnnnnnnnnnnnnnnnnnnnnnnnnnnnnnnnnnnnnnnnnnnnnnnnnnnnnnnnnnnnnnnnnnnnnnnnnnnnnnnnnnnnnnnnnnnnnnnnnnnnnnnnnnnnnnnnnnnnnnnnnnnnnnnnnnnnnnnnnnnnnnnnnnnnnnnnnnnnnnnnnnnnnnnnnnnnnnnnnnnnnnnnnnnnnnnnnnnnnnnnnnnnnnnnnnnnnnnnnnnnnnnnnnnnnnnnnnnnnnnnnnnnnnnnnnnnnnnnnnnnnnnnnnnnnnnnnnnnnnnnnnnnnnnnnnnnnnnnnnnnnnnnnnnnnnnnnnnnnnnnnnnnnnnnnnnnnnnnnnnnnnnnnnnnnnnnnnnnnnnnnnnnnnnnnnnnnnnnnnnnnnnnnnnnnnnnnnnnnnnnnnnnnnnnnnnnnnnnnnnnnnnnnnnnnnnnnnnnnnnnnnnnnnnnnnnnnnnnnnnnnnnnnnnnnnnnnnnnnnnnnnnnnnnnnnnnnnnnnnnnnnnnnnnnnnnnnnnnnnnnnnnnnnnnnnnnnnnnnnnnnnnnnnnnnnnnnnnnnnnnnnnnnnnnnnnnnnnnnnnnnnnnnnnnnnnnnnnnnnnnnnnnnnnnnnnnnnnnnagcccccaagcagcagggggccccggaccacgcagacagcggaggcgggcagcggcggacaggagcaggccgggcgggagacgaaggggggacaacagccagaggcccccccgagcaccgagaagagcaggcagcaggacaggaggaaggccgagccaggccgcacggcaggggaaagacggcgcgcacggagaagccacgagaacagaacaccaccacgcgggaagagccggggggggagggcacagaaagcacgagggccggagcaggaccgcagggggaaagcaagccccagacgcaggggacagcaagcaaacagaagcaccccacgcgcacaggaggggagagggacacggaaaacgcagagacagcacggcagggggccccaggaggcccgccccccaacccccagggagagggacgccgccaggcggggagggaacaaccacgccggcaccaagcacagacagacagagggacagcccgcccccccacgccagcgagaacagcagcaaacgcgagcccgggaagaaaggcgccccccagccgcagccaggggggcgagaggcgccggcaagggcgagggggcggagcagggagccggggaccgagcacacaccgccgagaggcagacagccgcggcccaaaaaagcaacacagaccacgccagccacggggccccccgaaagccgcacccgccccacccccgccgaacagcagcccgcaaaggcacgacagggcggagacgagggaggcccgaagggggggcgggggagcggggggaccccagggagagcagacaacggccagaggagcagaagcaaaaaaccagcaagcccaaagcaaagcaggcccgccagnnnnnnnnnnnnnnnnnnnnnnnnnnnnnnnnnnnnnnnnnnnnnnnnnnnnnnnnnnnnnnnnnnnnnnnnnnnnnnnnnnnnnnnnnnnnnnnnnnnngggggcaggcggaggagggcagcgcgcaaggaagccgagaggccagcaagaggacagaagagagacccagcaaccccgcagacgaacacacaacacacagaaaacgcaggccgcgcacggaacagcaacaaccacaaaacaggaaacagaaagaggcaaacaaaacaaagagggcccagggaaagaagcccgaagaaacaaagacgggcgcacaagcccaacacgagcccgacgaaccggaaaaacccaagaaggcaaagcacaaccacaagcggcaacaagcagaaagcaaaaaaacgaagggcgaagaaaagagaaaggaacagggccaagaagaaaccggcaggggagggaacaaagagcaacagcaaggggagagaacaaagagcaaggaaggggagagggcagagacaaagcagaggacagcaagacgcaaccgagaggagaggggagggagcagacagcgggcaggggcggcacagggccacagcacagggcaggggagaccggcaaaaacaaggcgcccacacacgagggccgaaccggaacacggcaccccacaagccgggggggaaagcaggacagaacagcacaagcgcgccggccccagcgagggggcacacgcacacacacacacacacacacacacacacacacacacacacacacaggcagacgcccccccccaacaacaaaagaaggaaaaaccagaacagaagagcagcccccacagacaccgcaccgccacagcacccccacccccccccgccccggcaccccccccccaccccccccccccccccccgcgaccagagaaccgccagcccccccgccgccccccccacgccccccccccccccccacacccacaccgccgccaccccccgcggccccccgccccgcccccacaagccacaagcccaggagaggagcgagcaagccagcagagcagaggcgggggcgcacaggaaccgacgaaacaaaccacccaagagaaaccccaccaacccaggcaaaagagcagccgggagaggagcccagcgaccggcccgccagcaggcacaggcccaggcgggagggaggagaagcagagcagcggggaagacccagagccgggcaggggacaaacacacaccagaacacgcggcgccgggcaagagcccacaaagcggagccggcacccacccccgcggccccaaggaaaagacgacccaggggcagaaagcccacagaaccaacagagagacagacgcggaaagggggacacacacccagacaggagggcagaaaacacacccgaaggaggaacgcacagaggccagccagggaacaaggggcgcccaacgcgccgggacaggaacgcggccgacaacccaggagagcggcgagcagcacaaggacccgccgcccacacagcaggaagggagaccaaagcgcagcaggcggaccacggggacacacaccacacaacgcgcaagcaagggaaagccgagccaccccgaagcccgggggaccacacagccaaaacgaggcagaggaaggcaggagaccaaggacagagcccgggcaggggaagccaagaaagacagcgccacggcaacaccccccaacggcccgggagccgcgaccaggaggaacaacacccaacgggcacgagcggggcagcagagccccgaccgccagcccgaaccccgccaacccccagaggaccgggcacccaaacgaagggcccacagggcaccagaacaacccccccccaagcccgcgaacggccagaaaaggggcaggaaggggaaggccgaagacggaaacaccagaccaggaggcgggcacccgagagcagcgcagacgaacagaaccccagagcaaaccaaaagacaaagaacaagccaggccaaggccgccagaccaggcgaccaaggaaggagcccacagggggaccaggggaaaaaacaccacaagaccacaaggaaaaggaaggaaagggaaggaggcacacccccaacccccacagcccccaaggacacgcgacccccacaacccccaaaggcccacccccacaaagcaccgggccagacagcacagagccggaggaccgaccacaaacaaaagcagccgcagagcaagaggacaagaccacccaggaccaaccggggcagacccggggacaggggagggagacccggagaggccaagaccaacaaaacacaaaaacagcagcagaacagagcaaaaaagagaagagaaacaaaaaaaacaggaggggggcaccacaacagaggaacgacaaggaccagaaaggaaaggaggaccaccccaaagaggcggaccgagagacagcaaacagcaagccggcaaagacacacaggagagggcacagccggggacgacagagccgacgagcaaaggaaaaaagaaaaaaagacaaagcggcacaaaggacagcaggccgggaacagaaagaggagcagcccacgaccccacccacagaggaggagacgagagggggggaggagaacaggaagccgcagggagagggagcaggccagaggccgcaggccaagccccgccggcccccagcccccggcagcccgaggcaggaaaaggggccaaacaccagcccgcacccgaagagccggaacgaaggggagaagcaaacaaggaaaagacagggaccgaacaaagcgggccgggcggggcagccgaggaccagcgcacggcaaaaagcaggagggcccccccaccagggcccgggggagaggggggaggacgagccgccaaacccgagcccggagcccaggacagagaaagaagggagaagaggaggacaccagccggcaaagggagcacagccagggaacacagcgccagaccaccaagaagcacaagagagggaaccaccagggcaaggccacagggggagccccaaagacacaggccaggggcacaggcaggacaggggggccccgagggacgagcgaagcggcgcaggagaaagcgccagggggcgagagggccagaggagaggcgcagcgggaaggcagacgcgaccccagcacgggaacgagcaggggcgcaggcaaccagagagggagacaagaagaccagcagcaaggccaccggcaacaagagaccaggaggcagccgggcacaagagcacaaaagagaagagagagagaaaaaggccaacacaaacaacacgggcagaaaggagaacccagcaaagaacagggccaccaagcaaggaggcacacccccccaccgccaccccacccgagccacgccaccaccgcgccaccacaccccagcccagccaccaccgggaccgcagccaagcgagagaacaggccgagccaacaaacacgagagggaggaaacgaccgggggacgcaacacacccaggggagaaaagaagaaaaagaaagagaagaagagcaccaaacaagaacggccaaagaaagggcaccagcgaagaaaaacaccaagaaggagaagcccccacccccaaccccacccccgcaaggcgcgggcccagaccccagcagccggacgcagccaaacagaagcacagggggggcagccccacgacccgaagacccacccaaacaacgcacacacgaaaacccagcgagcgcacaaggggaaccacaccacgcgagccaccaaccccaggcgccccaagcgcggagccgagagagcgggccccagagcgaacagagaggaagacgggaaaaacacaaggacgcaacaccccggccaagggacagggagccgacagcagagagaggaaggcggacaaggccccgacacgcgccgagaagcccaggagcccggggagcaccgacagaacacacggaaacacaccagggacagcccggacgcccagacgacgccacccgcgcccgaggcggaagagagaaaagaaaggagggggcgcagaaggaaagaacaagaaagaagaaaaaagggacaaggaaagagggaagaacaaagagggaaaagaaccaggcggaaaagagagaggaagagaaggccagcggaggaaacaaaaagaaggacacgcagaaggaaggcagaggaagaagccggaagaacgcggcacggcgggagagaagaaaaccaaggaaagcaggggggggggggagaaaggacacagccgagcaggcgaggaagggaagaaaaaggagaagaagagaagaagaagaagaagaagaagaagaagaagaagaagagaaagaagaagagaaaaaagaaggaagacagagagagaaagagaaaaaaaaaagaacaaagaagaaagaaggaaggcaaaaaagacaaggaggaaacacacacaaaaaaagaaaaggggggagagaacaaaacaagagagagagagaaagagagagacgaaagaagagaagaaaacaacaagagaacaaggaacaagaaagaagaaaggcaaagaagagaaaaggcacaaggaacaagccaaagaagaaaggagaagaagagagaaggcagacagaagacaagaaagacagggaagaaacaacaggacacagcagggaaaaaggacaggggcacgcagccaccgagcagccaacaggcaacgacaggggcggaacgagcacacccggaagcgagaaggccacaaggcagccaagcgcgaggacgaggacaaacagggggggcggcgaccacaaaaggaggccccacccagccagacagcccaaacccaacaaacaaagccccagaccagcgcccgaagcaaaaggagccggaccagccaacaggcgcaaaacacacaaagcaaacacaagaagccgcaaacccaaggcacagcgacgcccccgcgacaaaaaagaacaagcggaaaaggaccaagagggacaagagaggagcggacacagccagccagcacggggcagaggcacggagccaagcaaggaggcagaaaggacccagggggcgaggcgagggcaagcccacgacaagaagcccagcccagcccagcccagcccagcccagcccagcccagcccagcccagcccagcccagccccacccccgccccccccccccccccccgcaagagcgaaacggacgccacccaagcacagacgaggcgagaaacaccaaagcccaggaagcgggaagacagccaccaacacagacgcacccaggccccacccgcgaaagaacaggaacaagcaacaggggcgggagggcagggaaagaggcaggcagggcaggcaagcacaggcaggcagcacagggcaagacagggagagcacacacaaacaagggaacgaggggagaacaggggaaagaggcaggggacaaggcacacggaacagcaggcagaagagcaaggacgggggacacaccaagcagaaaggagaggaggcagcaagggcagaagggcacaggggggagagggcacacacagagcagaaagagaggaccgccccgacaaccgcaacagggggcagaggccccaccaccccacggaagcgggaaccccaaaacgaagcacgcagaccagcgcagcaagccagggccgcccccccgcaaagccccccagcaggacaagagaggcccacaacgcaaaggggagcggggagaacaaggacccagcgcccagcaagcaccaaccagaaaccagcccaaccccaaccaacaacagcgccaccaaggaaaaagggaaccggagggggagaaaaaaacaaagaaccgggcaaaagaagggaggaacacggaaccaaaaagcgagaaaaccaagcaaaaccaccagaggaaagacgcggcccaaaacccaaaaccagagggaaggagagcgagaaacggaaggcagaccagccacagccagagggacacgccgagaaaacagacgccaacggggcaccagggggaggggggcgggggggggaggagaagaaagagaggacccaccaagcagccccgcccgggcccggcccaaagaaggaggacagcaagaggacacgcccaccggcacggcgcaaggaccaggcggagcagggaaaaaaacagagaggagaggccgcagacacacccaggaaccagaccagcggcccaaaggaggcagagacccaggggcagaaagaccaagggaaccccacacaggaccagaaacaaaaagcaccaccagacaggccagccccccacgacagcagcacaccagagaaaacagcaggcacgcgagaaaggccggccacagaacccggcgaaccgcgcacaaagagaaaccacaaaaccgagcaggcaaaaccccagcccggccgagcgagggcgcaggaaaacaggaccaggacaacagggggcggagggggccagcagggccccgaggaacagagccagagaagaaaaaaaggcaacacgagggccacagggaggggcggagccacaaccacggacacggggaagggagcgcccccagcgcagccacacagcaaaggccaccaagccgaaggggggggggggcggaggcccacacgggcccaagcacacgaaaggccacagaagcgggccgcgaaacaaaggaggggcagagagagagccaccaacaaggagcaaaggcgggcgcccagcggaccgaagggcgcaccagaagggcagagcaagggcccccccccccccccccccccccccccccccccccaccccccccccccccccacaccaggaaaaccacacaacacaccagaagcaacccagcgacacaagacaacaagacaccgagaaaaccacacagaaggcccagcaaaaccccgaaacgacaccgccccaaggcacacggaagacgagcggaacacaacacagaaacgagacagaagcggacacaacgaaccgagcaggggaacgcaggcagccccacgcagagagcgagaagccgcccaccaggagcaacgagacccagggcccacccacacgaacacaaggaggcggcaagggacagagaggacaaaagaccaaaggacccaaagcaacggcaaccagggaacaccagccccgacgccgacgggagaagaaagacaaaaaagaaccccaggaaggagggaggcaggccccaaggaacaggcccacacgcccagggagaggagccaacaccaggacacacgcgaaaaagaaaaacggaaaagggcaggacacaccaacaaaaaaacgaggccaacgggcgggcacgccagggcggagacaggaagaaggcagccgcgacccggccacagcaccccggcacaccccccgcccgagcacgagccgccaagcagggcagccgcacgaaaacaagcagagacagacacagagcaggaagccacggcccccccccccccaaccccccccccccggcaagaggccaccgccccaggacccagggaacaccacaacccccaacagggaaggaaagcggagaaaaggagagagccaggacaagcaggccacagagggcccggcaggcgaaagagcaagacagggcagggacagcccccggggcaaaggacgggacagggccagggagaaggccagggggaaagagccacagaggccgccgcgcgggggcgggagaagggcgaccgggggacacacccacgccgccacgccagcccccgaaccgggaagcgaaaggccagagggggcggagcaaacacaaaaggggccacgagaaaaaaaacacacaaagaggaaggaaaaaccaaccgacccccgaaaaagaggaaagaaacaaagcggaacgaagacacccagagagaaggagacaaaaaaaaaaaaaacaacaaccccagggaaagaaaaacaaaaaacaaaacagagaaccaaaaggccacaggggcccaggcgcgggacagaaagaaggagaaacgaaccagacccgaccgcacggggcagagggaccccgcggcggaccccgacaacccgaaagacaacggcgggcacgcgaccccagagcggaaaagagaaaggcggccgccccacgccaaggaccgcagcgagggagggcacaaacaaacggggggaaacgcgccaggggggaaggaagcccagggagggacgccaccagacgcaagggagggcacgacaacagccggggggggcagcccccgccagagcggagaagggagggagggaagagcggagacagcacagagaggaagaaaggcggggcacagacagccggggaagcgccacggagccagcaagacggcacagaaacccaagcccagcggcggagggagcgagcacaggaaaagaacacaggaaaaaagggagaccccagagaccacaagagagggcacaaaacagccagaccagcaaacagcccgaagcccaagggacaacacgaacaagagaaggcccaagaaagaagcaagggcccagggcacaagaaagccagcagcaagccaagaacacgacacacagaacaccaagcggagcaaacccgggacacgaggccaagaaaaggacacccaggacgaaaggcagagggagcaggagagggcaggacccacgaccgagaacggcagagggacgagcaaaaggcaccaacacacacaaacagaacagacagaagcagcaaagaccaggcaaaaagaagacccacaggaaaggaaagccagagggacccggagacaggaagaagcgggcccgagacggggagccagagcccggccggggggaggccccgagccccccaaccggagcagcaaaaaagcgaccccccgccagaccaacggaagccagagaaaaaaccaggacacaccggcaggagacacaacccagaccgaaaggaaaaaggccgagcagagagaaaggagaggggccacacaagaagagagcgaagagaagaccgcgcccccccaagcccaaccacaacacaaagcaagaaaggagagacaagagacagcaccccacggcagagacgacccccaccccagggcaccaaaaaaagaaaaaagaaacgggagagggacagccaaagccagggcgcccccagggaggagggagccagggccaggagcaaggcggcaaaaaaaaaaaagaaggggggggggcaaccccagggcacgacccaccaaggcaagccgggagcagacccaaaaacaagagcccccacgccccgccccgagacggcgccagacagcaaggcagaccacaagccccacgcccaggggggggggggagagaaggaagagagcagccgcacagaaacagacacaaaagggccacaggcgcccccaccacagcaggccaacacagccaaagccacacgcgacaccgccagcggacccaggacagcacagacccacagccggggacccccgggagaaacgcagaaagcgagggggacacagggacagaaacaaggagggccggaggagagccaaggagaagacggaagcccgggcaccaagcaaaagcggagagccaagagaagaacagaccccaagacgccacccgcgcacagagcacccccagaaccacacccccccagagaccaagggcccccggccacgcccagggaccacgcccccaagggcaaaccccacagcacaccccggaaccacagcccgcccagccgcgagcccgcccgggccgcaacagcccggggccaaccacaaccccagagagacacaagagcacggagaagcaagacacaagccagcccgaagccaggcaaaaccggcggggcacgcaacaaaagggaccaaggggcacgaccacaggagacccaaccaagagcgcagccacaagagaggacaaggagaggggggggccgcacaggaccgacacccggccacaagggagagggggggccgcaccacccacagaccgcaaaccaaccccgaagaaaggacgccagggacggaccaggagacggagcgggccgcggcgaagcgaagaggacaaagggggaaaagagcaggagcccaacccgagaaacaccaagggaccgcccaccccccagacccccagaagaagagcggaaaaggcagaaagcagaggaaggagggggcaaagaaaggaggcacaagaggacaaaggcaggaaggaggcagacaaacgagcccaccgagaagcacccagcacgccccggcaccgggccagagggagaaaacacaggagccggaaaagaggaaaaggggggagggaaggacaggagaaagagcccaagaaacagagggccaggcgaagagccacacacacgcagggggacaggacaggaaaggaacagacaacaaaggagacaggagaaaggacgggcggagccaggcaagcgccgccgggacggggacgccacccagccagcagaccgcaccaccacacagaccagaaaagaagagaaaagcaaagagagacgggaaaggcagacccacagaaaaggaaaggggacaaaaagcgcaaacaaaccaccggagagagcggaagggaccagagagccggggcgcccccgccggcgcgccagcccccaagcccagaggccaggggcccaccagccaggccagagagacacaaagcccgccggcaaaggggggcaccacaaccgggcgccccacacaacccagggcaacagccaggccgggggcaggaggccaggcggacaggaccaggagggagggaggcggcccccaagggcaccagaaccccggccgcacagacccaggacccgacacaggacccccgaacagagacaaagcaagcacagaacacaccggccccagggcgggaacacaccacgggcgagagaggggcagaggggcccagagcacccagccacacgacccgcaagcaacacccaggaaaccagaaacccccagaaagacaagaagacccaagggcagacaaaccggcagagaacaagaaccacgcaaaccagccccaccgcagacacacacaggggcacaagcacagggggcagaaacaaaaaaaaaaaccggggggacacgccaaggaagccccgggacaagggacaagacaaaaaggggggcagcaagagcccagccaagaacgacgaaaaaagaaacacccaaagaaagccacccccaccccccagcgaggggaaacaggagacaggcggagaagcagagagcaaaaaagggaggaagcgcgaccccaggaaagaccacaggaaaagagcgaaaggaacacggagcccgggcccagcaccgcgggcgggaacaggccagacggagacgcggagaaagagaaaccagagagggaaaagagaggccagcagcgccaggaaaaaggagcccggagagcccagggaacaggagagcgagcaaccgagaggacaacacacccgggagcgccagccagcccaagaggcccgggaagagagagagcccaagaaccacaaaacagcaccacccgagaagacaaccccccgggacgacccacggcggaacaaaggagaacagagaaaggagccgaggcgaacacagacaggagcggcaaacagcagagacaccagcggccagaaggggacagcagagaaggcaggagggcagacgacacaaagccggaggcggcccagcaaggacaccaccaaaccacccaaaccagcccagaaaaacaacggaaaaaacaagcgacgggaaaaaaaaaaacaagaacgaaaaaaagagaagagcggaagacagaaaaaaaacagaaagagagagacagagaagaagaagaagaagaagaagaagaagaagaagaagaagaagaagacagacagacagacagaagagacccaggaaccccaaagcccaaccccgggcgaggaacagcggacagggaaacgggagcacagaaggcaagcacacggaacacacacagaacggccccagaagcacaaaaagcaagaaaaggcaacaaaaagccaggaacgccacaaaagagagacacaaaaacacgggaaaaagccacaaccagcaaaaaagacagaggcgcccacaagaacacagcgccaggcaacagacagcaggcacgaagcgacacgccgaggggcggacaaggacaaaaacaaccccaacaccggcgcccagccagaagcaaaacagagggcacacgccgagcggccgcgaggggggaggcaggcaggaaggcaggcaagggggggggaggaaggagaccagaggacagcccaggaacacacagccacaccgggggggggggggggggggggggggggggaggaaacaaggcccagagccgacagagggacaacacgagaccaggagaaagcaaccgggcccccacacaaaccacacccgacacccagccccagggcaagacagggcccggagcccggcgccggaacgaccgagaccaggcggcccaaaccagaaaccgccggccgccccaaggcgggaaaaggggcaccaccacgcccggccccacagaccaggggagaaaaggacacagagacccagggccgggaccccagcacaggaaacacacaagcaccacccagccggacccacgggccccccgacggccacgggaaagggcaagaccaagggagaaaccaccaaccaacgacacccccgagacagccaccacaccccacagaacaaagcagagaggccacaagaaggccaagggaagagacagggcgagcaacggcacgccgcaccccgccagggccagagggggagaagccacaggccacagggcaaaggggaggcccacagggccgccacggcacaaccagcgcaagaccacggcagcacagaaacaaagagacggcggaacagagcagcaaagagagcacagccaagcaagccagccagcccagccaccacccgggaacagaaccagagcccccgaaccagggagacaacacagaccacaagaggccaagaaagcacaaggggacacacccaaccacagccagaaagccccaccaaaccaggaagaccggaagaaggcagcaagcaaggaaaaggggccccaccgcaccagcaagcaccaaggcccaaagagaacccaggcagcccgacggacagcacacgaggaacacccccaaaccacccagagaacgcaaaaggcaaacagagcgcaggaaaaacaaagccaagcagggaccagagagacgcagaaagcagcagaggcgcaacgcgaaaaaaaaccgcaaaaaaaaaaaggcacccccagaagcagacagaaagcaacaagagaaaacaaagcacaagccgcaaaccgcaacacgaggcaaagaaagccaaaaaccaacaccaccaagaaaacaaaacccagcagaaacaaagacgcccgggaggccaaagggaaaagaaggcaggaggggaccaggaaaggccaacaaaggcaggcagcccaggagagagaacgaaaaaggggcggccaaacaaaacccagcccagccagacgggcacagggccaagaggagggacggcccacagaccacaccgaaaggcagaccggagcgcgagccaacacgaggaggcggccgggggagaaggaggcaccgccagacccagccacacccgccaccgaccggcccccgccaggggaccccagcagccagggccaaccaagcacaaaccacacccgaggccccccacccgagagcagaacccccggccaaccggggcccccagccgggaggcagcgccagccagcacccaccccccccaccccagcccccggaaggagccaaaaaagcgcacacccaagcacgggacacagcaaagacagcaagcaagacgaagcccccagcacaacacaacccccggagccggcccacaacgcagcagcagacaggaagggaacggcgggccaacaccgagaccggacacaaaagaacgggacaagagcaggacccaccgggccacaaaggaggaccccaagacggagcacagaccccacccccagcgggcaccgcggaccggcaaaagaccagagccacagcccggcccggggggagcccacccgacccaggcccccagcaccaaccggccgcgagagggcaggcggcaggcaagggcgagccgggagaacgggggaggcggagcccgccaggaaagccccacaggccccccgcgcggggggggccggagcacggcacaccgcagagcgcgacacccaccagggacgagcaagcacgccaacgccgcaaccccacccagaacaggaaagacgacagaaaccaggaggccggaggcagggagggaaggccccgacaggaacacaaaaaacaaagagacccccccccaaccacccacacccaacaacaggaggaaacaccgagaacccccagaaagcggcacacaccaaacaagacagccgggggcagaggggggcccccgagcgagcacaacacgggccccaagagccagcagagcaaacccgcccccgggacggggggagcacaaaggggacaggaaggaagcgagcgggcaagccagccccagcgaggcagcacaggaaaaggcccacacagcagagcggggaagaacccgaaaaccgacacgaaccagaagacagcagaagacaagacgagaaaagacacgaacaaaggcggaaagagcgaccagaaacaaaacaacaacaccacccacggacaacagaaagcagcaagagggaacagcagcaaacagaaacccggagagagacaaccacgccacacaaaaaagaggagacagagacagcccacacagccagagcaggacagacagaacccacgacccacgggcagggaagccaggcggccgaccaaacaaccccgcccagcccccaagaaaggagagcaaacacaccccccccagcgcccaacaacccaaccaccccccccccaccaagaggagacccacccccaccaggccccccacccgaggcaagcccaagggggccccacgaggccagaccaggcagccccgcaaaggggaggggggggggggcccaacagcgggagcgccggggggccaggcgagagaccacgggccaggaggagacgaggcccaggggcaccccccccagcccagcccccaacaaccacaggggccccagccacaggggggaaaacgcacgacccagcgccggggcccaggagggaagccagcaaggagaaaacgcccgaagcaggaagccacagcacacgcgacgagggcgccgggcaccaccaagggggacccgcgagagacccaagaagaacgacacaggcgacccggacacacaccagacaaagacgcaggaaagcaacgccaggacaggagaacaaccaagaacaggcccaagagaagacaaccacggaccagcccgccgcacccgagggcggcaggcagcccacccaagaggagcaacggggacaagcacccaacagaacaacccacccaccgcaggcgccagggagaacccggggcaggaggcagaggcagccaaaccagacacaagggagaaccagcaccaaacagacaggaaacgccacaacacgcaaacccagcacgcgccccagccaaaccccacccaaacgcagggacagggccagcaagaaggagagaaagccaaagcaaagagcacaacccaagaacgagggcaccgccagggagaggacaaagcaacaccacgacacacccgggacgaaacagggaggcgaggcaaggaaaaaagaacaagaccaggaccccacggcagaagaccaggcaagaaggcgggaggcaggcgggccaagggccagaacgaaccaacagaggcaaggcaacaagacagagcaaagcggcaccaccacacccgagagaggggccgagacagaagcaaaacagcaagaaagggacagggaggaagggggggggggggaaagaagcccagacagagacaagcccgagcaagaggcaccacagagacacccgaacccagaaggagacggcacagaggcgcgggggccgaacccaggcacaccgcgacccacaaaaccggccaaaaagcccagcacgggggggggcagggggggggcgagccgggcagcgggaagcgggggcgggccgggagggggcgcggaggagcgcggaggcagcaggcggagggcgggaaacaccgggcggccggcagcacaggccggaaaagacacacaacaggaacaaagaaagcggcaagccacagcccaaagggaaagcaccggcagagagagaggcgggccacaggaggggaacaacagcaagaacaggggcggcggcacacgagcaaaagggaagcagagagaacaggcgcgagaggagcaaccgagccgccaaggggagggcacgggaggggcaaggggccggccacaccaaggagcccagagaaaaaagagaccaaaaaccacaaaagaaaagaaacccaaccaaaaaaaaacgcaaaaacaaggccagcccagggccggcaccgacacaacaaaaaaaaagggaggcaggagaacagagccagggcagccgagaacaaggagagaccgccaaagaaaaagaacaaacacaaagccccaagccacagaaacgggcaagagaaagagcaagccaaggggaagcccggaccgagggggcagccagggaccgcccccacaaggggaacacagccgaacacggaaagccgagagagggcccccccagaccaggggagaacgccgcaagccccaaagcccaggccaacaaccagcgaacacaaagacccggagaagaaagacacagcagccacacaccacacaccaccacacacaaaaccaccaccaccccaccccaccacacacacaccaccaccaggggagggaagaagaccacaacaaacccacccccagcaaacacacgccacagcacgccccgacaagcccacaagacccagacgcacagacagggaagacgaagcagagagcagcagaacccgccgcccaccccagccagacaaccaacaccccagaacaacaggagaacggagcggacgccaccggccgacccaccgagaggaaaaagcaggggccagggacgaggagaacaaacgggaaagggcgaaaaaagaagaagaacccaagcagccccagaacccacagaaaaaagaaggggaccacgagaccccaagcgagcagggaagagggggccgggcccacggccagacagcaagccacgagccaagagagaccgcggaaacaaggcaaccagaccgcgaaaaagacgcccagccccaacacagaagcaccacagcaggagcacacacacacacacacacacacacacacacacacacacacacaaccacaccaaccggaggaaggcagagacaccgaacgaacagagcaccacggcacgggcacacacaaagaaggcaaacacacaaacgaggaggcggaagagcaacgaagggccaaaccacgacgccgccaccgcagggggcagcccaccaggggcgagacccgaggggggccaccaccagcccagcgagcccagacaacagagaacagggaccagacggggacacgcacccacccggcaaggcacccaacccggagaagggcgaaagaaggggacgagcgggaacacagccgaacaggccccacgcggcccaggaagccccagagggcgagcaaacacaaagagacacagagaaccaacaaacggagcaacaagagccccggcaaagccggaagagcgcaggcgaggagccgccgacacccgagagagagcccaacgcgcccccgggcccgacacagccaaggcacaacaagacagggcagcaagagaggggaaaacaaaaaggcaacagacgaaagcccccagaagggaccaaagggaccccggggcgaacacgggacgaaccagcaggacacacaaacccgagaagaagcggagggcagaaacccaagccaccagcagacaaggcccgaacagggccagggaccaggacgccaaaaaggggccgggagcccaggaggggaggcccaagcccaggaaaacagccaagaacgaggggacaaaacgccacccccggcgaaggcggaaaaaaaaaaagacaaaaaaaaaaaagcaagcgagcagcaccaagaaccccacaggcgacgcagcaaaccaacgaaaacagccagacagacaggacagaaaaagaccggggcagaagccacccccgccaaacagagaggcacgggcgcgggggccggagccaaacccccaccaaacagaggaagggggccaagcgccccgagcacgcccggggggagacgcagccagcgcgagccaagccaccacccagcaagcccgccccagccccgacaaagggaaaaaagccacacccccagcccaccgaccgggaggccaaaaccgagccagacggagcaaggaggccgggaagccaaaaccaagaaacccacaccaggccccccacaagcggaggagaggcccacccacccggaacaacaccccacagggagcgaacaccacagcccagccacccccacaagggagaaggccccaaaaccgaagaccaggccgacaccagcggccagagaggccaacgggcagagaggggcgcggaaaaacaccagcagaagaaagccaggccgccagaagccggcaggcagcaccgaggaaagacgaaacccggcaggcgcgcccagagcgggaggaacaggcaacgcccaggcccccacaggacacgggacaggagaaaagaggacccaggagaaaaagagacagggaacggaaggggcacccagaggcccagcagaaggggaagagacagggagaccgagcagaggaggacaacccaccccaacgaacagagcggggaaaagcaggcccggccagaagaaaacaccccaccaacgccaagcacaagcgcaccaaaagcagaagccgcgagccggggggacggcggaacaaaaagacggccgcaccaggaccagccccacacaacaagaacagaaaccacaggaagagcacgagaacgcaacagggaccgcggaaacaggcgccccccaaacaaaaaaaagagaaagaaagcaaagaacaaaaaacaaaacaaggaggcgaaaagaaggaagcaccaggaacagaaccaaaaaaaggggaagaagaaaaagaagcgaggggcagggagaggccaggaaggcggcgaagaagggaagagggagcagcaccagagcgccaggaaagggggacgggaggcccacgacacagccagagaaaagcaagggaccggagcaagcgcacaaggagacagaagcaaacggggcgaggagagaccgcccaggcgcaacgagaaaggaggagagcaacgacccaacccccagcacacgcaccacacacacacacacacacacacacacacacacacacacacacacacacgagacaaacggcacaagcaaacccgacacacacaagcagaggaaagcagccgaagaccaggggaaagaggggagggagaagaaacacacggagagcccaacacagcccccaggacccagagccagagacagggccaggacccgggaacacagaaagaccccagccggaggccaaagcaaggcaaggacggcagcggcagcccagagaacccggccgccgcgccaccccagcgccggcccgggcagcccacaggcgaacccgaccagagggcacacagagggccacacccagcaaccccaccaacccgcaccacagaaaggccacaaagcacaacgaggccgaaggcaggacgacacaaaccaggccagaaggacccccccgagccagcacccagcaccccacaccagcgcggcccaagcgcggacacacacacaaaaaaaaaaaaaagggggggacaggaccggaaccgccagacacccaacacccccagaggccaggagccaccccaagaagcgccggcccaagaaaacagcccccccccacaacccgacgagccccccaccgccacccgcccacaccagcaagccccccaaaaagcgccgaggcggccccgagggccaaaggaacaaagcagaaaggaaaacgagcaaaaaaagcaaggagccgccaaaaaaaaggcagcagaaaaacacagaacccaagggagcaacacacccggaagacagaacaaggggaagaaaagaagaaagcgaagagaaaaacaaaaacgaagaaaagaagaggagcccagcccaaacaaagggaacaggagccaggaggcaaagggccaaaccccagagcaccagaacgcgagagcaggcacacccgagccccaaccggacacgacccaaacacacaaggccgaaaggcaaacagccacaaggaaccaaacaaagggcaccagaaccacccagagcgaagccagaggaaggaggcacagcagacaccgggcaaggcaagggcaggggcccgcagacgacagaagagaaaacccccgacagggagaaacacccgccaaggagacccagacggagggggaggggggagaagcgaagccgggacacaaggaaagacagacccgcacacagaaacaaagagcagagccagcagaccagacccccgagcaccacccccgccgcgcaagccaggcaaagcaccccggcacagggacaccggggccaaaagaccaagagccccaggcaaaacagaacagggaggaaacgagcgaggaaccaggaacaggagagagggaaagaaaagagaaacgacagggcacggagccagagcagggcacacgaaacgacacgggaaaggggaacaggcgggcaaacagccaagaccgcagccagcacaagcaggcaggaggagccacagagcccgcagagacgagacccgacaccaccgagacccggcgaccccgcgacgaggcaggcaccaccccggaggcaaccgcagggagaagaaagcagaacgcagccccgaagggcagagagccaggaccgggccagaaggaacggaggcaagaacaaacgaaccggaagcgcagagccagaaggggaggacagagccacgggggaacgacccagacagggcaggagagacaagaagggaccagggggagggaggcacaccggacaccggggaaacccagccagaggagacacccaccaccaacacaccggggccacaagacgcccaacacggacaagaagagcgggcgggggcaacaccccccccggcaagcccccagccgggcgaacagaaccaaccacacaacaagacaaaacaaacgaggaagaagaggacgaggagcgcaccacgacagagcaaggagagacgcgcaggcccaggagcggcccacagagaggcaccaggaaccagagccagccagggaaaccaaggaagcacccagaagcaaccccacccgaaggggccggcacgcccacacccaacccgccaggaagggcagggcacagggaaccaggcaggagaaccaggagcaggccgggggaaggggagcaccaccagaccgaaaaaagacgcgaaagaaagcccaccgacaaccggccagggaagaggagcgaaagagagagcgcccaacaacgggcagcgggccgaaaggaaaaacaacaggaagacgggagcagggaagagccgggggggaaagagggccggaacggagagaggcccggagagagaccagggaagacacggcgcccaaaggaccgggcagcagacccacagaacagccccaaccacgaacagcaggagaacaagcccgaccagggcaaagcacaccagagaaacaacagaggccaacaacaaacagaaaaaaaaaacaccaaagaagcaccaaagaaagaaggcacgggaggacacgacaggcgggacacacaggaaaccaaggcaaaggaccaagcgcacaagggcggccacagaaggagggggggcgccgggagccggaaacagggggaagagggaaaacggcccaaaaacgacccccacagcccaagcaggacccaaaaaggaaaacaagcagaggacccacagacccacacgggagcccggggaggcagagggaagcaaagacaacgaagcaaggagagagacagaagaggaggcaccaccaacagcgacggagggaaccacccggcaggcagcacgggggggcaggcggacacgcccagccgggaaccaagcccagcaaccccccccaaagcagagcggcgcggaggcgggagggacacgggcccagcccaggccaggccggcaggacacacgccacccagacacagcgcccccgcgccagggagccgcagcccacaggccagccagccaccgggaggccacagaggggcagaaaaaccagaaaagagagcaacgagccaaagacagaaggagccaggagaagcagcagcaccaacgccaaaccgggcaaaagccgggcccccacggacaagcgcaaagcgcccaggacaaggaacacagacagccaaagcaaaccggcgagaccgcaggagcagcagccgaagaggcacagggcacagaacacaaagacccagcccccaagcggggcaacgcccacaagccaacagaaccagagaacagcggagaaaaaaaaagagcggcaaggccaacacgggggagcggggccaagacagaccccccaggcacaagacaggagcccccaaagcaacacgagcaaggaccacagaaagacgccagaggacggacagacccnnnnnnnnnnnnnnnnnnnnnnnnnnnnnnnnnnnnnnnnnnnnnnnnnnnnnnnnnnnnnnnnnnnnnnnnnnnnnnnnnnnnnnnnnnnnnnnnnnnngaaaagacacccgagacaagaaacacacgaaggacccaggcagggcaaaaggagccccaccagagcaacagcagccacagaacccagagcacaacgaacaagaacaagaaacagcgaggccaccaccaaaacagacggcagcagaaggggaggcagaaagacgcaagagcggaagaggaggggggccgaggcgccgggcagagcgcagaccaaacaacagccacggcacccacacaggacacaaaagcccagcagcacaccccccaccccacgagcaacaggcaagaagcgcgagggagggggacacacgaggaggaccccaagggcccccaggcccaggggagaccccagagcagcagccagaacgggcaggggacaaaacaaaaaagggaaggaaaggggccagaggaagggaagaagagcaaggaagcagcagaaagagacccaccaacagaacacaaaaagaccaaaaaaacgagaaaaagaaaaaggaaagaaagaaccccacgcagcaaacgaaaacgaaaacccaacccacaacggaaacacacgccccaaaccagagggaagccaacgccagggcacacgccgcggaggggaaccacgcaaagcaagagaagcaaagaggccacacggcaacacagcacaaaaaagccacacaggcgagcccacaagagacaagaggcgcagaaggacaggggcgaacacagccgcgcaaccggacgaaaggcagggggaagccagccagaaagagacgagggaaagacaaccaacggagacgaaaaaggaccccacacacgcgcacggccacaggacaagcccccccacaaaggcaggggagaggccaagccccgagaagaaagagccaaccggcaggcggcaagcaggaggagaagcgcgccccacaaggagggacaccacgggggcacaagccaaaggagcccagaagaaaaggcaaaaaggggcaagcaagagaaagcacaggcacggcaaacaaaaacaggcagagagcggcggggcgagagccagccccgagaccagacgacccgccccacacggggcaaacaccgaaccaaacccaagagacagagccgcggcacaggaccaccacacagaccacacagacacacagacacacagacacacacacacacacacacacacacacacacacacacacacacacacacacacaacacgcacagaggaaaaacaaaaaagaaagaaaaaaacacaacagaagaacggcgccaagagaaaaaacacaaaaaaaacaaaacaaaacgagaacaaaaagacaaaggaaagcaaacaagggaacgggaaacgagaccagccagcgacaggaaaaccgaagcccaaaagcaggggagagagacacacacacaaaaaaacacagcagcaaacgaaggcaaaaaaaagacgagggggggcagggccaggccacaagccagggacaggggaggcagaggacaccggagagggccccccacaggggcccagggaagaaccaagcaccaagaacacggaagcaaccacgcgagaaaccaaaggcccaagaaggacacgggaaaaaaagcaagggcccccgagcagagcggaacgggcagacccaagacgacccacagagccaagaccaccgaaacagaaacaacaacacaaaagagcaaaacaagaagagcaagaaaaaagggggggcgccacaacagagggggaacggaaaggacggccaggaagggagaaccagccagacacaggcccaccaagaggaaagacacaaaaggaagaaaagggcaagcaccaagcaaggannnnnnnnnnnnnnnnnnnnnnnnnnnnnnnnnnnnnnnnnnnnnnnnnnnnnnnnnnnnnnnnnnnnnnnnnnnnnnnnnnnnnnnnnnnnnnnnnnnnnnnnnnnnnnnnnnnnnnnnnnnnnnnnnnnnnnnnnnaaaagggggaaggcggaggaggaccaagagaggccaagccgccaggacaccccgaaaaggcccgagcgaaaagacccgcgggcacagggggaaaagagaaacagaggcccagcccagagggcacaaaggggagccagagacggaggaaggcagggaggcaggagagggcaggaacggccccgggcccggaaagaagagcggccgagccagcagggaggggagaagaggcggagccggcgcaagaacacacgccaaaaggggacaggaggcaccagaagaagagaaagaccagacagacaaagaaagggccaaaggaccaaagaaacaacagaaaaccaaagcacaggggggggaccagcaggcgacagacggaaggaggggggagacacagaagaaggacaccaagagaacaggaggaagaggacaagaaagccaggagcagccgccccgcgacgccaaggcgcgcagccacaggagggaggagaccaacccaggcaaggaaggacccccaaggccacaaccgcaacgggcccgggcagaaagccgcacagccgaagaccacccccaggcaggcacacaagccaggaaggacgaggacccagcagcaagcgagccagcaacccaagcagcgggaccggccagaaaacaaggggggacagggaaggccgccagggaagccgcacgagagcacaaacagccacagcgacaaggaggaccacaacaaaggaacagcagaaaggcaggagggagggggcccgaagaggggcagagagaaaaaaagggggccccaggaagagcggcagaggcgcaagcgagaggagaccagacaaaggacacagaccgaagaggggcccagagaagagggggaggacaacaagccagaggaggaaaaaaacggcagcacagcaaaagagcccccccccccccccccccccccccccccccccccccccccccccacagaaaaagagcccccccccccccccccccccccccccccccccccccccccccccccccccccccccccccggcgagacaggccaggagccggagccggaccaccgagaccaggcggcccgaaccagaaaccaccgcccgcccccaaggcgggaaaaggcggcaaaaccaccaccggcaaggaacaaagaaacaaagagaaacccccagcaaggagaaagcagaggaaccagccgcaaaaggaggcggggagaaaaaagaaaaagaaaaacacagccagaacaacaagaaagcaacgaacaagaaagaccccccagccaagggggcacggaaaagaccgcaaacaaaccaggacaacgacccaaagcacagcacccaggcagagggcaggaagagacgaaaccaaagcagaacccggaaaaacaacccagacagcaggccacaaaccaaagggggacccggagcaagaagaacccacagggccccagacccccggaccccaagcagacaccaggacagacagagagcccaccccaaagggcggaacaggaggcgggaagaccaagagaaaccacaagcacgggggaaggaaggcgcacagccgcagaggccggacaacccacaaggcagcgccgcccagaacagacacccacagaagggaagcggcggcagcaccaaggcaggaagaaacgcagagagcc

SEQ ID NO: 641 - RNA, 1714 nt, Mus musculus
ggcagaacggggcgcaacgcccccccagccgccgaaccagccgggaacacacagggaagggccagaaagggacaagagggccaaagcaggagaaaagggagccagacgccgcaagaagcccgaccagccccaaaaaggaccaagagaagagccacccccacagagaaggaagaacgaggaccgaggcaagcagcaacggaaaggaacacacgaggagcaaagcaggcccccaccgaaaaaggacaaaaaacgccgacacagagagaagagaagccagaggaaagggaagcaaagcaaagggaaccaagcgaggccaagcacagacaaaagaaaaaggccagggaaagcacacaacggggggggggggggagagggcggcacacaggcacagcacaggaaaccacaggggcggggacaacccgggcccagcaagccccacccacgagcacgcggccccacacagcaggggcccccaggcccaagaagacccgaagcagcagggcaagacaagcgaggagcaaacccagagaggcagaggccacaagcgggaggggaggccagggagagcgaaccacagcaacggcagaaggagagaggccagggggcccaagaggaagaacaccacagccggccccagacccgccccacgcgggggagagaaggggccgaagaggaccgggaagcaagcgggaacgccgaaacagcgggaagccacgcaaaccccagaaagcaagaagcgcaagccaaaaaccaaccagggaccacccaccccacggaaacgcgccagggacaagcgggccacgggagccagggggaaagcacccaagacaaagggcgggacagaaaccgagagcgaaaggacagagggccccacaagaccgccaagcagaggcacagacccacccccaaaggaggggggggaaccggggggacagaaacacgaaaccaaaaggacaagagggcgcccagccaggccccaacagaggccacccaagaacagggaaccacgagccagaacagccaggagggaccagcccgccccccgggcaacgccaccggcgaggaccggcaagagggcgccaggcacacagaaccagagaggaccccagccccagaacacgcaaacggaggaagagaacaccagaagcaggccgggcaagaaccagccacccacaaagaagcccggcacacagaaggccggggcaaccaccacagaaagggaggaaagggccgggaaaggggcgagaaggggggagcgcacagccgagggagccgcagcacggggcacaggggggcgggcgggacaccccgccagccggacggacgccaggcgccgggccggagggcagaaacgaaagggagcacagaaggaaagcggaaagaagaagaaaaagcacccaccagaggccgcccccacccagggcaagaaaggaaaacgcggaagcagcagaggcgcaggcaggcgccccccacccacggaacccgaggaacagccggggggagcacagccgaaccagccccggcccaggggcacaggcgcgccggagaagagcaaaaggaggccgggcaggagggagccccgaggaaccaggcaagagcggccggggcacacccaccgccaacgcacagaaaggggaagaccgaagggccgcgagaaagggcaagcaggccacaccagaccacggacagagaagagcaaggggcagagaagacc

SEQ ID NO: 642 - RNA, 3518 nt, Mus musculus
gcgcagccaaacacccgcccccaccgcaaggccccagcaggcaaaaaagagcagaggcacacaagaggagggaaggggggcagggcccagacccggccccgagcagggaggcacccgccacgcgaaaaagaaacaggaagcagccaccccgagaacgcaagaccacgagaaagcagggcggggggcccgcagccagagcgccaggggcggggccgcacggccgccacgggccaccaggaccacccgcacaccccccccggagacacaaaccccgccaaagggagaggccccgcccccaccagccgcacggaacggggcccgcacccccccgagagccagcccaggccagcaaaaacaaccccccccagccgaagccccacccaaaaagaagggccccccaccagaccaacagaggccccagccaccgcaagccaggaggccggcccagacagaggggaggcgagggagcgcaagagcacccaagaggagaggagggggccacccaggccccgacacagagaccccaccaggcacagccgacaaccaggccccccccaaaggcgccggccggccccacccaccagccagcccagcaagcgccagcggcaccccggccccccacgccccaccaccaaagggcccccagcaccaaccgcccaggagacaaaggacacccagaacccaccagacacaggcccgcggaagccgggcccaccagccagaggccaacacaaccacagcaccaggcccgcccagagcacccaagaccagggacggggggcacccagccaaacccagcaaccgagaaagggaacccccacaaaaacaaggagacagagccagaaagacggccacacaaagccacacagcgcaacaggaggggaagaaccacaggcgaggcaagggccgacccccagaacacccacaaaagggaggcagaagggaaccaacaccgcaccgcggaggggagcccaggagacagcagacaccaagccgaggcccccaaacacaccaccaaggaacggccagggacaaccagagaccccccccccccacgccacagagagggccaaagccagccagcgaacagagaccaagggcagggcacccagcccggccagcaccaagcagccagcaccaggcccaaacccagaaccagagaacaaagcaacccgccacagccacagaaccagagcacaacacccagccccaagcagcacagccgccaaacgagggggcggaggcccgcagcacaggacagggccgacagagggaacaagacagacggccacggggagcgcccccagggagagcaggcggggggcgagaagcaaaaccaggaacagcacggcgcgaacaaaccaggagggcaagccagaggccgcaagccaacaaaccccccaggggagagaacaagagcggacaaaaaccaaggaaacgcccagcagggcgccggccacagagcacagggaggcaggaagcacaggacacaagggggccggacaacagacccacgaggaacccgggccaggagaacaacgccaggaccaacccccacgggcgcccaccaacacccagggaggaaacagaagaaggagcaccacgggccaggcgagaacccgccacaccccacaaaacccgaccagaacaaagcaaagggcaaagggaagaacggcccaaagccgggggccgacccacacgggggaggaaacaccagccacacacaccagcaaaccccgggagagacacagacaaccacccccccaaggcccagacaaaacaagacacaaccaccaaagcacccggagccaagaaagaggagggggggagcagcaggggacccgaaagcagccacccgaaagacacacccaacaggccgccaggagaaaaaggaaccccgccgcccaccgacacaacaagccccacccccaggcaccaggcacaacaaaaggcaaagcaacagcggaggacagggcggaaccagggagggccaggccccccaacccccaagagggaaagcagaggaacaggcacagcagcaccggagcaggcaagcagaacaaaaagggcagcagggcggagaacagcgaagacagcaaaaaacgagacgcacagcaaaaaagaaggagagcgcggcaggacggacccagcagaaagcgggaacacgcggagaccgaccccgggagggcgcgaacagaccagacgccgcccacggccgggcaacacgaccaaagcaagaaaaaaggggacccgacgacagccagggagaggacacgggggggaaggcagcaggagcaggagagggcagcaggaagcagaaggcaagaaaccagccagccacaccccaagccccgaggcccaccccacccccacccccacccaccccagccagcaagcagggcgccccggaaccacccacccgacacccgaggaccagacccccgcaaacgacaccaaaaaaccacccaaccggagaagaagaaaaaaaagcacgccccaagccaagaaagagaggcacccccaaagaacagaacgcaggagagccaaacagcagggaggcagaacccagaaggagcaaccgcagagcaggagcaccgaacacacgccggaaacacggccacacacaccgcggcaacccacaacccccagaccccgaccacgcagcccaggccgcccagcgccccacccaagcgggaccgaaacagaacgaggagaagccacccgcggccaggaggacaaagagggcccagccaccggcgcccgcaagggccgcaggcacaagcacacgcacacagaaaaaaaaacgacacaaaggggggaaaagaaaaaaaaacacaggcccagcccgggcaagaaggcgaggcgccgcccggggcaaaggcaccgacacaggcgggacggaaggaaggaagcaccaaggggggggccacaagaccaggccggcgaggagggggagaaaagcccccagagaccgaaggaaaagcccagggggggcagccaaccagcaggaggggagagacaggagaaccaggcaaagacagccgggcacagggaagacagccaaaacaacaacagagaaaccaccgaaagaagaaaagaaagcaccaacaccgcggcgggcaccccgggcaggcaagcaagggggacccacgcccacccgaacaggcaccccacacccaccccaccgcccaaagccacaacacaggacggacaaggggccaagacacacgaacacacgaccaccaggcaaccagaaggcgggcacagggaaggcaaaaggccaggaggcagcccccaggaagaagacggccccaaggcaggagacggggaagccacaaagcaagcggcggggccccggcaaaaaaaaaaaaaaaaaaaaaaagaagaggaaaagaagaagccccaggaacaagaggaagaaaagagaaaacgggcaggcacacgggcccaagcggggcgggcagaaacccgggcaaaaacaacacccaaaaggagcgacgccaaacacccccaaggga

SEQ ID NO: 643 - RNA, 1891 nt, Mus musculus
gaaccagcaaaggaaggaaagagaggcaacggcggagagaggaccgaggcccggggacgggagccgggaagagcaggcaggcagccaggggacaacgggcagagggcggggaggcagcgcgaacaggcaggagggagggcgggacgaaggggcgggacgcgggccagagacagcaggggaccaggcggcccaccaaccacaggagcggagcggcaaaccagcgaggcaaaggccccgcccacgcaaaggggcaggcgccagacgcaggagggcaggggcaggggaagggaggcgggggcgcgcgcgcagcaaggcggggggggcaacaccgggggggcgaaaacagccccccgaggaaaccaaccccaaaagggcaaagcgcaggccccggagccagcagagacacaaccacccaagaccgcccggcagcacaaggcggacagacgcaaaaacagagcccacggaccaaacaccgcgcccccgaacacaaaagggacaaaaaaaaaaaaaaaaaagaaccccgaggacacaccgaaccccgaaaccacaggagagcagagcaaaaaaaaggaagaagcacccgaaaaggagagggaggggggaacaaagcgcacgggaagggaaggagacacgggccgggaggggacagggcacccccaggcccaggccggaaaggagcggccaacaggagggggggcacggacggcaaaaaaagccaccacagccggaggggaaaaagaaacgcagagacaggggacagagggagggagggaagggggggagggccggaagacgcccgcagcaccaggcgggaccaccgggcagagcgaaccaccggcaaacgcgaccagcggcaccgacagccccagccagccccacacaagacacccgccaagaaccaagggagagcgaaggggaaaggggagcacgggcgaagggaaccagccaaaaggagccacacagggaggggagagcagggccggcccacaacgcggagaacacgggacgccgccccggcccggccccgcccccgaacacagaagcaagggcgcagagcaaaagcaccagggccacgggaggggggggaggcacaggggcggagcagccccagccagaccgccggccaggccacagggggcaggggggcacggcagaaggaaacgggacacaagcacggacaaagggagccaaacgcagcaggcccacaaccccggagcccccggagggcaacagggccacagggaagaaaaagccggacaaccacaggccgggccagcgggaagcaaagcggacaacagagacagcgacagagcagggcaagcgccgccagagcggagccgggggggggggaggggggggcggggcgagaacagccagggggaagagaccaaaaagcaacaaccaagccccaaagcagagagagccccgggcagcaccaaaacggaccaaagcaggcccagccccccagacaacaccgaagcaagaaggaaaagcaagccaagggccaaagcacacggggccgagaggggcaccgagcaagcggccaccccaaagcagagggacggggagagagaagcgagggagaggcggcgggcaacagcgaggaaaaacccacccgcgcaagcacaggcccggccggcacgcaccccacacccccccagccggaagcccccggccacccaaacgccaagcccccccagagccagaaaagcgggaccaggagcagggaccgggcacccgcgccaccacaccggggggcggaaagggccacccccaggagagaaggcagcggcccccggcccaccaggcaggaagcccaacccgaaaagcccgagccgcccagaacaggaacaggagcaggcagcccggcgccaggggaggcgggacgagg

SEQ ID NO: 644 - RNA, 3758 nt, Mus musculus
  misc_feature (1)..(200): n is a, c, g, or u
nnnnnnnnnnnnnnnnnnnnnnnnnnnnnnnnnnnnnnnnnnnnnnnnnnnnnnnnnnnnnnnnnnnnnnnnnnnnnnnnnnnnnnnnnnnnnnnnnnnnnnnnnnnnnnnnnnnnnnnnnnnnnnnnnnnnnnnnnnnnnnnnnnnnnnnnnnnnnnnnnnnnnnnnnnnnnnnnnnnnnnnnnnnnnnnnnnnnnnnngggggggggcgccccgcccccagcacacgcaaaaaccgccaggccagccccggaagcaagccaccccgcccaccccacccccccacccccgaccggggaccgcgaccacgagcggaccccagagcccggcgcccccaacacaaaaacccaaacaccaggagggccagccaacagaaaaaagcgaaggaagaaaaaaaaagcgcacccccccacacacacacaacacacacccccacaccacacagaaagcaaagacagggaggagaacggaagaggaaaacggaacgggaagcacgaaaaccaacaagaacgaggaccggagcaaaacacagaaaaaacaagacaagaagaaaagcgggaggacggaggagcgggcgccaacaaagcaaaacccccccccccaagacggagcgccacccccaccagcagacccacaacaccaaggagcagaaaccgcccccaaaaacaggcaaaaaaggggcacagccaaacggggacaacagaggaggcgacagaccggcggggcgcaggagagaccagaaaaagaaagaggaaaggggaaggaagacagagaagacagaaggcccgagacagaggcccaggagcaggccaaggaaagcccccaccccacccccaggacaggcgcaacagaagaacccaggcaaggcaaacagcaaaaggggagcacagcgggaaaacagcagaaagaaaagagaaggggaacccccagaaggcaagagcggaaaaaaccaaggacgccagagggagaggggagggacgagcaacacaaccaagagaaaaaaaccaacagaaagccaccaagaccgggaagcggcccaagggaggccacaaggaagaggccgggagagggggccggggaaagggcacgggaggaggcgaggcccagccaagccagcccaggagggaccgcaccgcagacaaggaggagccagccccccagaccggcgcgacaccaccaaaggcgcgagaaaggcaaacccgaacgaagccagccccaaaaagccgaagaggaaagaaaccaacaagacagacgcagaaaacacccacacaaaacaaccaccgccccaaagggcaaaacagcacacacaacaacgacaaaggaacaaaggcaaaaagaacacagaaacagaggaagcaaaccggcacccagaaaaagcaggaaaccaaaggggccagcagcagcgaggaggaagaaccagacccggccccaccccagagcgggaaaagcaacaccaacggcgaggacgaacccaagaccgggacacaaccaggcgaggcaagccccagagcaagcgcgggaagccaggccgccagccagacacagcagccgccgggccgaaccagagacgccgcccgccacgacaggaagagcaagaaagcgccccaggggcgaggacagacacccaagcaagcaagaggagggaaagcaaaaaaacagcgaggggcgggagaggcagagcgcccaaggcgaggcccccaggaccacagaaaaggaggagagaacgaccccacaaggaaacacacacacacacacagacaacacacacgggggggggggggggcacaaaaaaaaaaggagaggcccggggggccgaagggaggcccacaggcaccgagaccggaaagggagggagcagaggccagaagcggggcgccaggggcgcacccccaccacaacggaggggcagagacaggagccaggaaaacggagagagcacaccccacacccagggcccccgaggccccgggacagaagccagagaaggagggggaacagcgggaaacagaggcccgggaacccccaccaggacgggccccgagccccccaacaccgacccaaggcgcgacagaggaaccaaacccaagcgagaggagaggcagccccccagagaagggcaccacacggggcggccaccaggaggcaccagaacagcaaggaaggaagcgcaaggcagaaggcgggaagagaaaacggccacaggaccccccccccccccccccccccccccccccgccccccccccgcccccccccccgagacagggccggagccggcgccggaaccaccgagaccaggcggccacaaaccagaaaccaccgcccgcccccaaggcgggaaaaggcggcgccacacgccggcccacaaaacgaggggaggacagccaaaagggggcaagcacagaagagagagagagagaggccacacaggaggccagagggggggcccgcccaaaccgccacgacccgggggggggggagaggaccagagagacacgacacagagaagccagaagacaagggagacagcgccccgccccaggggaccaaggcgaccgacagcagggggcaggaacaccaccacgagcgcccacacagccaacggagagcagagccacagaaagccggcggccgaaaccacagagccgccgcccgcccaaagcagggaaaggccgcacaggcaggcccacaccaaacaacaaaccaaccgagccacgggggaggcacacacagcgagcaaaagaggcagagggcaacccaggagccagcccgccacgggagggcggggcaaaccagggcaggcagcaagcaccaaaccgaggccaacaggggcagacccggggggggcaaaggacccccacagaagccaccaagaccacggaaaaaaggacaaaaaaaacagagaaagacaagaagaacaagaagaaaacgggggggcaccacagcagaggaacgaagaggggcaggaggaagggagaaccacgccaagccaccccagcccacgaaacaagacaggcccccgaaccgagaccgcaggaggcgggacaagcccgaggacggcgccgcccccagggcacagacagacacggcgccacaccggaggggcacagaaaggaaccagcaagcccaagccaaaccgccccaggccggcaaccacacccccgacagcggggagcgaggaggacaagacaaacccaggcaccggcagggagggaagaggcgccggacgacacacaaggcaccggaccaccagccccacaccccgagcaacaccgcggcacccacagccgccagcccagacgacgccagaaccacccacgcagggagccagccggcccccccaggccaggcaggggcgacccaggcccagccggcacagagagggaagccggcccgccagagccaaggccccagccccccaagcggacacagaaacagcagacagcccaccccgaggagggaagccacgcagagagcacaccaagcagcgccaccacaaacacccaaagcagagccaggaccaggcaggaaggcaaccggcaagaaggacagacaacccagagagaccgcgccagcccaccagccaaagaggggccggagccgggccgcaggggccgggcaccggggggggacaagccccaggccagggccccaagcaggcccgcggcggggaccgcaagcccggagacacaagccccccccccagcccgggaagaagcaagaggcccaccaacgaacgacagggcggggacgaaccca

SEQ ID NO: 645 - RNA, 1081 nt, Mus musculus
cgggaaggccccggcggaccgaagcaccaccgcgagccaccgcggccgcagcccgaagccgcaacccgccaagcaacaccccaccgccccccagaacaggcccgagcacggcccaagagccccccccacggcgcgggggcggcgagcgacgcagcgacgcaaagcagcggggaggggcacgaggagagaaggggagggggggggggagcggagcaagaaggcgacagcaaaaggggccccgagaacgcgcacagaaaacgccgggcaaaccgcccaggcgggaaagaggcaagaaaaggcggaacaacaagccaaggcagagggagcccgcggaaaaagagaaaagccgcgggcccaagcgggagcacggacccggagggggggaggcagaagcggggggggggggagacacgaagggggcgcccccacccccacaccgcccacccaacgcagcgccaccacaccgcccagccgggggcagggagcccgggggggacacggacccgagaccgccggcaccacgcgccccagcccagggccccgccgccccaggcggcccaaggcacccggccagcaagggacacggccacacggaccggacaagcggcggaccgcacccaccccaaccggcgaagggaggaggacccccagaccaaccccgccacaccaggagaagcagaaagaggacagcagaggcacaacgaccacagggcgcgcgaaacagcaagcgcgccacgccagccgcaccccgcaggaaccaggagcgggaggaaaccaggaaaaaacaaacccagcaagcaggcgccagaggagacaagggcggagggagcgcccacccccgcggagaaaaacacgcccaccgcgagggccggcgcaagcggggcagagcggggaagaagggggcgcgggacaccaaaaacaaaggaaggagaccggggggagcgcgggggaggggggagagaacgccagaggcgcaggggaggggaagggagaggaggaggacgccaagcagccaccagacagaggggaaggcagagcacccagggagaaggacgacgccaggagaagaggggcgagagga

SEQ ID NO: 646 - RNA, 7440 nt, Mus musculus
aaaagcaacccacaaagcagaagccgaaacgcggacacgaccggcgaaccccacaaccaaaacacggcaaaaagggacggaggagaccgaggacgcggaacacacaacgcagccagcaggagacgcaccgccgggagcacacggccagccggggaggcgagcgcgggcggcggcagcaaagaagcgcgacgcgaaggccgagccggaacgcgaaacgggcggaaaggagggaagcccgcgcacgcgaagcagcaggacgaaaacagacgacccacacagaagcacgaccaacaggaggaaggccgacgccacacagccagcagacggcaggcaccggacagcaaaaaagaaacgcggccggggcgcagggaacagacggccaaggggcaaagcagaaagaaaagccagagagggaccaaaggaaaaagaacaaacaagagaggcgacaacccgcccacagggcagaaagaaacaaaaggccccaaaggaagacgaccgaagggggcagacaccacgaaaacaagacagaacacgaccaaaggaggagggaaggcggcaccaggaacgaagcaccaggagggaggggaaaaccaacaaaccagacagaagaccagaaaccaaaaaaaagaaaggacagccaagaaggaaaggaaggagggggcaaacaccgcccggacgaggaaccgaaaaccccagaccccaccaaacgcaagggaagcgaggcaggcaaggaaaggaaccggaaacaaggcacgacaagaaaaaacgccagcaagcagcaaaagaaccaaaaaacacaaacaaagcgcccgaacccagggggcagcacaagacaaaggaacaaagaacccaagacaaaggaaccggaggcaaacgacaacccgagacgagggagaccgccagaggcagggccgagaaacaacacaacagacggcaacggacaggagcagccaaaagaacggggccgaagagacaggcgaaggaacacccccccccccccccccccccccccccccccccccccccccccccccccccccccccccccccaccccccccccccccccccaacccagcagcccagaaagagaacgagagcggagagacgcagggaagaaacgacgccgcagacgcgggggggggggggggggggcagccacaaccacgaacccagcaacgagcaagcccccgaccgcagacacgcacacaggggacacacagagggcaaaacacaccaacacagaaaaaaaaaaaaaaggaaaaaagagaggaaaagaaagaaagaggaagagggagcaacggaccaaaaaagggaaggaacgcggcggcacacaagccggaaaggcgagacacgcacgccgggcccgcccccccacagccaccgcacgggacagccagaggccggccggcgcccgggccgccaaaacccccgaagcagaaacaccccgcacacaccggcccgcccccgaaaacaaccccagcacacaaaagacgcaccgcaacaccacaagaaaacacagagccggggacagcggggccgagccgaagcaaaaagaacaaaaggggaagaacaagacgagcaaccagggggaaacacccaacagagaggagggaccagaagaagaaaaaggaggcgaaacaaggaccgcaccaaacggccgaagcccaacccacgagagccaaaccagggcgccaggaccaaaacagaaggacacggggagagcgccaacaacacacgccccccccgacacagagacagcgcccgaacagaacaggaaaggaacagaggagaagaaccagacaagaaaaccaaagagaaaggcaaccaaaagaaccacaggcaggcagagacaaccccggcacggccaaagccacaaccaggcaagcagaggagccgaggaaaggccagggaacaggacacccgcagaggacccagccaaccagcaccaaggcagccacaacgccgaacagcccagagcacgagccccgacccaggggcacaaggcacgaagggagcacacaacagcaggcggaaccagcacaaaaaaaacaagacaaagcaacaaaaagaccaacaaaagacagggcagcgcggggggacgagcaaaaagaagcaacgaagaaaaacccaagggaaaacacaaaccaaaccaaaaacgaccaaaacagagaagaaagagagggaaaaaaaaaaagcaaaaaaaccgagagcacagacaaagacaaaaaaaaacccaaaacgaagccaccggaaaagaacaagccaggacaaagaccaaagaccgaggacacgcaaccacggggcacgaggcacggccggaccagcagaagagcaagcaagcccacagcgcaggggagagagacccgggcagagccaacaggacccaccccacgaacaagagagagaaacaggccccaccaccaccaccaccacacacacacaccacaaaacacccagaaggggaaagacagaccaggaaaaggagaggcgaagggacccacagcgacaagagcgacagcggagccagagagacaggcaaacccaggccagcagagacggcccagagcgggcaccccgccggccgcccagagaacaggggaaagcgggaaggacgacggacaaggggcgaagagacgaggaaaggcacacagaaaccagggagcggggaaggagggcgggcccagcggggaagcccacacacaccaaaagaagaacagggaaaacagagaaggagcaacacgaaggccacaacaagaggaaggcccaaaaaaaccgagaaaacggcccacacacgaacgaagcagcaaacacacaaaaccacacgaagccgagaaaccgccccgcaaaccagacccggagggacaccacgcgagcgaagacccagccacaccccaacacgaaccgaaaagcacacacccccagagccccgcacgagcagccaggcacgagcagccaggcgagcagaaccagagcccaaccaaaggaagccacgagccaaagaacacgccaaaaacaaaacaaaacaaaacaaaacaaaaaaacaaaaaaacaaagaaaaaaaaccccaccaacccagggcggcagcggcgggggggaacagaaacgcaagaggaagggaggggcagggaccaaaaccacgggcacgggccagcgaacggaaggcaacacacacaggcgggcaacccacccaccccccgaaccaagcaccagaagccggaaaacagcaggaagaacaccaaaaaaacgcaagcagaaaaagcagcaccagcagaacaagaaaacacaggacaccccgccggcaacgaagcaagcgcagagcgccagaccagagaaaggaagcggagcaacaagggcagaacaaaggaagaagaagcgacagggacgaagagccaagggaacccgcagaaggggagagaccacccacggcaccacaaacaagaacaaacaagcgagagcaacggaggcaacagagggcagaaacaagcaaaaacgagcagaagcgaaaaaaacacccaccgggagacggggccccacggagcaccaggcggcagagacccggcggggaggagcagggagagaccaaaggcagagaaagaacacacgaggccaaaaacagggagcccaggggaaagacgcaagccccagccgccccccgggcggaaccccccgagacagcccccagagaacagccaaccccccgcagagccccaccccgcccccaacccccgcacgagcgccacgaagggaaaagcaccaaccgcaccaggccagagggacgcagcgcacaacaggcaggcaccggcagcaaggcccgcggaacacacccccccgccacaagacgagacaccccccacccccgcagcgcagcccgcaacagccacacacacaggggccggcgggggcagggagcccaggcacggagaaaccaggcagcacaggacgggaagacaaaggggccgccgaggcaggaaacacgcgcaagccgggagcccaaccagcagcagagggagaacaggccccaaaaagagcaaaagaagaaaaaaacaaacacgaggcgcgacaaagacgacgacagggccaaggaaggaggccaaaccgagaaagcaccgagaaagagaccggagacagaaaaaaaccaaacccaaccagcagcaaagccccaccacccgaaccgcagcacagacggaaagacagagaggcccagaaacacaaaagaacaccgccagaaagccaaaaaaccacagagaaggaaacaagaggagaaggaagaagaagaggaggaggaggaggaggaggaggaagaagaagaagaagaagaagaaggagaagaagaaggagaagaagaagaagaagaagaagaaaaagaagacagaaaaacgggagaagaacagagacgagaaggaaccagaaagggcaaaagaccaaccaagcaaaaaaaaaaaaaaaaaaaaaaaaaaaaaaacccagcaacagcaagaaaaggaaggacagcagagacagagagagcggaggaagaaaggaaaaggagcagaaagaggagaaaagagagaccagagcccacgaaagccccgccggccaggcaccacaacccacccgccaacaaggacaccccaaaagagagacaaacgccaacaaacaggaaggaaacaagagccgaaaaggaccagccaggagagaggaacaccgaagacggaggaagaagacgaaaaaaaacaaaacaaagacacaggagaggcaaaacagacaacaaaacaaaagaaaccagaaaacccacagggcacccgggacaaaaccgaaaagaagacagacagcaagagacgacaaaagcccaagcccacagcccccagaccacccaccccagggcccgacaaaacacagagcaggcgccgaggccacggaggggaccccccgggacaagccaaccagcagagagacacaaaggaccgacccccccaagaaccaccaaagccagaaaggcccagcagagacaggagccaggagaccgacagaagcacagacagcaccaggcagaggacacgcacaggcacaagagacccgcaaaaccgcggccagcagcaaacagcccacaggcacagaagaggaaacaaccacgggacgcacagaacaacaacaacggaaagggaacacccggaaaaaacaaaagcacaagccacgaaaaggagcgaaagcagccaaacaggaccgcaagaggaaaccccagaaacaaagaaagaaaaaaggaaaaaaaacagaagcacaacaacaaaaagccacaagccacgcaaaagcacgcagaaaaccaggaggagccagagggcggcggcgggggggggggggaggcggaggggagacagggccggagaccggcgccggagcacgggaccaggcgccacccaaaggcgggaaagggggcaccaaccggcgacacccagaggaagacaagagaacacacgaacaaacaagaacgacgccaccgcccccccccaaccccccgcgccggccacacaccacccgaggccagaggacaaggcaacacaacccagggcagggagagaggcagcccgcccaggacccggcccccagcaagggcggcaccaacacgaacagggcagagggagagggaaaggaagcggggcggaaacggcaccggcaagcaacacaccgccccagccggagccgcccgaccccccaagacagacgagccacaaggcaagaaaaccaccccagcggcaggaacacagcagagaagaggaagagagcagaggaggggggagagcacccaacgagcagccacgaaacaagggccaacaaacgcaggccagaaagaggaagcgggagccagacaggccgccagaggacggcaaaacgagaggcagcgccagcagggggacccgagagaggagccggacgcaaagacgagaagggaagaccacagaggaagccagaaacccaggggcccccaaggcggacagagcggcaccgagaaggcccccccagccccacgcccacacacgaagagacggccacgcggagcacagagggcgagcgcggcacacagcagggacgaccgccaaacagggaagagaaggacacccacccaaacagaaaaaaaaaaccaagcagaacaaaaaaggggcccccccaagagggggaaagggcacaggccaggagggaagaaaggagggacggaccaagaaaccggggaagaaggcagaggaaaagcaaagagaaaaagccagccgcgccgaacagccccgcacagaggccgggcagaaccaaaaaggccagaggagcccagacagagccccccccccccccaccccccccaccgcccccgcccaccccccccaccgccaccccagaaggaccaaggcaagacacaacaaaggggcagggaaccaccgcaacaagccccccaaacacccccacccagaggaccagaaaggcagcggccaggagcaaggcagaaaccccaggaccaaagggaggaggaggccgacccagggaaccaggccggcacgaggccacagcccccaagagggccacaggcacaaagggcaacgccccaaaccccacaggagaggaggaccggagcagaagaccaagacagacccaaagaagaccaaaagccagagacagccaaaaagaccccagacaccccccgcaaaacgaacacaggccagcacggaccaccaccgccagacaaaaagccagccccacaggacgcgggggagcaaggaaaagccaccaaagagccacacaaccccacagaaggccccccagcccagccaaggcgcccccaagaccaagccaagccagccaccaacaagcaagagccccgcccggaacaacgaagccccccgccccgcccgggcagaccggccccggcccccaccgcccggggccggggcccaagagccgagaccagaggccggccccgcccccccaccccccgagccagcccggcgccccacggccagacggcccccaccccaaaggggccccggccaagccgacacccgcccaacgaggcagggaaggcggccaccagccgcccccgagcagcggagccggcaggaccccaaacccgcaacccaccaagggcgagccagagcaaggcaagggagcccagagaggcgagggcgccagaacaccaaccgagcccgaacagaccacccagcccacaggggggagcgcccagccacagacaagaggcccggggcaccgaacagccccgccagaagaaggggaaaggggaaccaaacccagaacgcgggggcggaaaaaagggccgacaaagggacgcgggcaacgccaaaggggacacacaacgcccagccaccggcaccgcgcccccacccaaaaaagaacagaagggcagagacgaagacaacggggcccaaggaggcgcgagacaagagaagccagaccccaggaaa

SEQ ID NO: 647 - RNA, 4305 nt, Mus musculus
cggggcgcaaagcaaaagcgcccgacaagcggggaagaaagagaagaggccggggggagacacagggcgaaggccagggcaaaagaggccccggggaggccgggagaaggaggggggaaaggcagagcgcaaggaaaaaaacccagagagacgcacggaagggagcaaggccaacgggcgcagagccggggccggcccgacgcaaacaggagcacacaggaaaacaaaacaagaacaccacaccggagagaaacgaaggcgaccccccgaccccccacccaccccgccccgcccccgcacgcaggcgcccagccaggcaacagcgccaggacagagggcgcaggggggggggggggggggaggggggggaaccagcaaaagccccagggccagcaggagaccgaaacccaggggcccacgagcaaagaaaaccaggcgccccagggcaccgagaagcagaggggggcgcgaggcgcaggcgggcagaacgcaacgagggcagcccccacacccaaggagcggaggaggaaccccgggagagccgcaacccagaagagacacgcgaaaaaacggacaaaccaaagagccagggagcaccgcaagaccaagggaaccccagaggaaggacggccaggaagaacgcaggcgcacaaacaggccagaccccacaagcccagccccagcccgagaaaacccaagaacacagagcagaggagacgccagaagcacaaacccgaaccagacccgcgcacgcagggccacccagagggggcacaggcccagccacaggcaaaagcccgccaccgcacaacgcacgggagagaagcaagaggcacggagcgcgaaaaagaggcacagagaaggcacaggcccggaacggaaaggggggagccggcacgcaggcgggacaaaccgggccgcaagagcaacgaggcacaccaccgagccacccagcccgacagaggacaacaccaagaggcgccccccgcccggggccacacgggagggcccccgcaagagccgcccaagcaggcgaggaagcaacaagaagaaccccgcgagccgggagccacaagccaacccagcaccaggaggcagaggcaggcagagccggagcgaggccagccggcacggaggagcagacagccaggacgcacggagaggacaacaacaaaaagaagcccgcaggagcgggccacggaccaggggacagagagaagacacggaagcaggacagacggggacacgccacacccggggaccaagcacgccagcaccaacccccgaaagaccacaacaagaaaacgcagcgcaggggccaaaggagccaggcagaggccaagcgaaacagcaaacggacacaagacgggagcacgggggaggaagcgacgaggaggacccacacacgcacggggggagcagcaaccggaggaacacagcgccccagaagacaaaccgcgcaccgcacagaagcgcaaggcaaacagaggggggcgacgcccggcaggagcccaggcagccaaaacgacgaagcgggacaaacccgacccggaggggggagccgcaggggcggaagacagggccacggggcccggcgagcggaaagcacacagaccagagcagcgagacacagaggcacagccccgccggaggcgaaaagcgcccaccaggccggaagacccggccccggcccacccacgccaggcggccagagggggagccaaccacgaaggaaacaaaaaggacacaccaggcaacccacagaaccccaccccaccccaaaaagggaaaggcagcaagagagacaggccaggacaaggagcaaggagcggcccagaacccagaggggaaaagagggaagagcagggagacagagagacagccggacacagagaccacagaaaaaaaaaaaaaacagacccaggcccacccagacagcaaaaagccacaaacaaacacagaaccacagggggggcacggccaggacacaagggacacagccaggcacggaaaagggaagccaggagaaaagcccccacagacggccacagcaggccaggggaccgaagaacgaagggaagggacagcccacggggcagcgcacccaggcaggaggccaggcgaaaagaaagcaggcgagcaagccagggagcaagccgcagaaacacccccaggcccgcccgccaggccgacagacccccaggaaaggaccagagcgaaacgaaacaaaccccacaagaggggcagggaccaagcaagaaagcaacaagagacaaaaacagcaagacaacagagaaaaagcccacgaagagcaccggacggggaaaagaaacaggcaacgcagaggaacaacaaaagaaccaagaaaacaaaaaaagcccacgagacaaacccaaaggaaaagggaagagcaggcaaaagaccagggacggagaaccagagaaacaagagaaaaacgggggcaagaggaaccggaaccccggcacaagagggcccacagagcccggcgccggaagcgagaacagggcggcccagaccacagagacacgcaaagacgaaccaacgcaggacggggaaaggcggcacaaggaaaagggaaagaggaaaagcgcgggccccgacccaagcccccggcgacccaccccccaacaaagcggcacccacccaccgcacaccacgcaacacaaaccaacacgcacagaagaagcacccaggaacagacccagccagagaaggagaaagaaagcaaacaaaggcgagcaaggaaaccgccgccaggccgccgccggcggccacaacacaagacagggcagaaaacccgccagagccccacaggcgacggcccccccccacgcccgggaacccggcaccaacaaggcacagaaaccggccccgcaagaaccaagaacccgaggcccagcagcgcggggcggcgcacggcccaggcgcgagcgggcccagcacccagggcgcaaaagcaggagggccgcgcaaggcgcaagcagagaaagcagggggcgaggggccggccggcccgccaccccagaaagcacagcgagaaaaagcacccgcccaccccggaacccagcaacgacgccgggccccaaagccagcaccccgggagaaagcaagaagagccagccgcccgcgcggcaggccacggaccggacacggacggagccggcgggaggccccgaaaagcccgcaagcagacaagccgggaagcggggggcaacggagccggcggacacaacgccagagagcggccgccgcgccagccagccgcccggggcgaccaaaggaacagaaaacaaacaggacgcgccaaaggagagcgccagaaaaaagcacggcaaaaggcaaagcccaaccgccaaacgacagcggggcaaaaagaaaaacaccggcaacaggcgaaccacgcccccccccgaaaaggcccgaaaggcacgaaaaaaggacaaaaagaacggaggcaaacaacccagcacccggaagcagaggcacaagaaaggacgaagccaaccagacaagcaagccggccagccgggaacacagagaaccggcgcgcgcccgccccccaccccccaacgccacccacaacacccccacccagaaaggcaaacaaagaagaggggcccagaaaagccaggaaaacccagagagaggaagagagggaagaaggaagggaaaagaaaaaggccaggagaaaaaacgcaaagaaaaggcgggcccccgccaagaaaaaaacaggaaacagcgcggaagaagccaaggagacaaagcagcaagaagaaaaaagcagaagccccagagggccccccccaccaagaacacgggcgcagaacgccaacgcccgcaaagggagcccgcaagagccccggacaaacaagagagggcagagagggaaaaaaaaccacacaacgagaggacagagcccccccagggggacgcgagggaggccccaaccgccccgaggcgaccccccagcccaggccaagaagccaggggaacaccacagccgcagcgacgcaggagcccgaagcaggagaacaaccagagacagacaggcagacagacagacagacagacagagcaagccgcccggggaccagagacccagggcccagccggccggccggcccagacgaagagcaggcagcgagaggcccccgcccggcagccaagggcccgccacggccgaaagaccacggaggccagcgaccacggggggggaacaagaagccgcccccccccccccacccaccccacccccacccccgacaagccaggagcagggcggag

SEQ ID NO: 648 - RNA, 598 nt, Mus musculus
gaccagcgcccacacaaacagagagacggggggaggcccacccaaccgcccgggacccagagggggagggggacccggaagcaagggaccacaaccaccaagaacacccgcacccccccagaccgcccaggccgagccccacccccgccgccccccaccccccggggaagggggaggaaggagcgagggggcgcggcgggccgcgaccaccgcggccgggcggggggggggggcgggggaaggggggggaagacaggagcgaaggggggggagaccccgacgcccccacgcgggcccagcacagcaagcccacggagggagaggacgcccaacaaccggcaggccagaggcccggagaccccccagagccccccccgccaacacgccgggcgagcgagccccccccccccaagccccgcaggggacccaaggccccgcccagagacacacagcagacacgcccccccgagagccaccggccggcgaaaggcggaaccaagaaaaggcagccgacacgacgagaaacgaggccagagacagggaagggagcagggccccccgccccaaaccacgagaacaaccacgggccggccaacca

SEQ ID NO: 649 - RNA, 3774 nt, Mus musculus
aggaacgagcagcagcccccccaaccccaacacacagagaacagccgcgacgacacgggaagaaacgaccagagagcagcgcacagagggcggaacccaccgggccacgaaagaggcccgggccggaagcaggcccggaaggacaagaagaaccggaagaaaggcggcagcccagaacgccagcccacccgggcaacccacagcgaaccacagaccagaccacgagaaccaagccaacgagaagacccaggggaaaagaaagcgaaggagccgagagcgagccgacgccagccgggccacaggcgcggaggacaagggcgacagaagaggccacacagagcagccggaaagacaggcacagcccgaaacccggcccaccaaccgaagccaacaggagaggcagagcagaaaaaaagcgaagcggcgaagaacaagaaaaacgaggccaaacacaagaccaaaaaaaaaaacacgaccccccggccagaccagagccaaggacccggagcaggacgagaacaagcaggggaaaagagaacgccacaagaggccaagcacgaggggaaaaaaagccccggcggcgagagccgaggcccaagcagacagccagggcacaccacacagcagaagcacagaggaaagaaaagcggaaacgcggcaagacgagacaggaacaagaaaccaggggaacacaaagggaaaaaacaaacgaaggaccaaccaaaaaggaaagcagaggccagaaaaacaagcagggaaaaggggcaaaaaaaaaagccaggaaaagcaagaaaccagaaacagcccaaaaacaaagcgagggaacaagacccggagagggagggacccacaagggaaacgcaaaaaagacaaaagaacagaaacgccacaagaaaaaaaacagagccaagagacgggaaaccagcacgaaaaccaggaaaaaaaaaaaggacgacacccaccgaacccgacagcaaagagcgaaaaggaaacagcgaaaacacaaaagaacgggagcaacgaaacaagaccaaggagagaaacacagcccaaaggaaaggaaaaggcgcaggcaaccaggaagcgaacagccccagggccaccaagacccgcaaggcgacccagcccggcagaggaacaagacccaaaagggggcggaaagaggcaaacacagccaggagcaccacccagccaacacgaggaggaagggaacgaggaacaaagaaacacccaaacgcaaaggcacagggaaaaaaaaacggaaaggaaggcgcggcgggaaaaggggagggcacgggggggggggggggggggggggaacggaaggcgcaagagggcaggacccggaggcagaaaggcgaacacagagacagaaggggcggaaaccaaacagagcccgaagaagcaacaagagccaaccacgagccaccccagcacccagcgacaaagcgggaaccaaacccaggacggcacacaggcaagaagacccgagcacgcccagcacaaaaaggaagaggcccaaagccaacgacaacccacaaaccaaaagacgcgcagcacaccgaaagcaggaaaagaccaaaaaaagcaaaggccaacaggagcggcacaaaaaagagaaccaggagcaggaaacgaagcaaccacagccaagccccgggacacagcacggcaacaaaacacagcagaaacaaggaggcagaccaccccgaagccaaaaaaaacaccaacagaagagccacaaaacacgaagacaacaacaccagggaacaggaggggaaaacaaaaggagacaccacgacgaacagcaaggaggaggcagggacaagagccccaggaacgcgccgccccagggcgacgaaaagcacacaccaacgacaaaaaagggcaggggggggcgaaccaagcccggcgaaaacaaacaccagaaagagcagcaaccccacagggacgcccagacagcaacaggaagacaaaggccaaccagagaacaacaaaaaccacaaacgacggacaacacccccaagagccaggacgaaccagccacacgaaccgagggggggcacagaggcacggaggacaagacagacaccaacacacggcgccccccgaaccagacccagcagccagaccgcaggaccgccaccccgcccccaagagggcaagacgccgagcggcgcacccaaccaacgcaggaacgaggaacacaaggcaagggaccagaggccgccacaccagcccaaagaaaagcaagccgccgggcgcgaagagaccagacgccagacaccggcagaaagagaaacaacaacacacccgcggagaagaaacagggaacaggcggacacagaccggcagcggcaaacaaaaccaggcaggcagccagcgaaaggcgcggacaggaaagaagcacgggaaggccgcccaacacggaggacacagagcaaggcagccaggcagaccacccaaaaacacccagaagcccaaccaacccccaaacaccagccccagaacaaacaacaggggaaagccaacacagaaggcaagcacacgcaaacacacaggcagagaggccaggacagccaagagaaccaccaggaccgagcacccaagcgccccggaagacgcacggaccacacacacgaaggccaaagcggggggagaacaccaccgccaggcagacacgcaagccaccggaccccagaccgccgggggcgcacgagacacaaacccgaaaagcaccacagaggagagagggagcacgagaagcccaaacacgaaccaccagccgcggcggcaggagcagggcagcagcagagagggggagagagagagagagagagagagagagagagagagaggcgcacaaaagacaaaacaaacacgacaacaaccgccgggaccaaaccgacaagaaaacaacagaaaagcaggcaggcaaagggcaaaacaggcagagacggagaggaagagcagcacacacaggaaggcagacagagagcagacaagaaaccaagagaaaaaaacgcgcaaacacggacgcagcgagacaagagcacaaggaagggagggggggggggccacggaaggggcaacccacagcacaaaaggcggccacacgcaccccacgggaagcagaaggcggcgcggggcccacccgcagccaggggagccccaccccagcagccaacaggaaccccaggacaccccagcaggccaggcaggcaaacccacaagggcaacaaagaacacacagcccagaccacccaccccacgaggccgccccacaggccaaacccagaagcaaaagagaggggacacagcacaaaaggagcacaggggacacaaaaaccaaacgggcgaaacgcacccagccgggaagccaggagcacggagcagggaccaggggcacagagccacccggaagagcagggcaaccaggaccggaaacaacccccgaaaccggccaaggggacaaaccacacaggagagcggaaacggggaacagaaggggcagaaacgggcggggacaacgggcgcaaccgcgcgaacgaagcgccaaacagggcagaggcggcccgccggaggccaacccaggaccaggcaaagaagaaagggagaaaaaaacaaaaaacggggaaacaacagaaacaccaagcaaaaccaagcacaaaagaaccaaggcaagggacaaaaaacggagaagaaagggagaaggggaggagagccagcacaagcacagaagagagacgcagcacaagagccccacagggcgga

SEQ ID NO: 650 - RNA, 814 nt, Mus musculus
gggagccgcccgcccacccagagcaaacgagggcacaaagagcaggacggcccaagacaaggaggcaacgaaaagggcacccgagaggcaccagggcggggcccaccggccgcgcgcgaggaggggcccccgccccgcagggggccgcccaccagccggccccgcccgcccgcccaaggcgggggcccccaccaccacgcaacgaaagaaggcggaagaagacaaaaagaaacggagaagcggaaaccggcgggcgcaaggaaaacaacaacacaaagcacgcagacgcccagagccacaccagagaggcggcccgcggaaggcggcaagggaggaaaccccccggcgcaagcaaacagaaaggcccggaggagggagagagcagagaggaaggcgacgagaaaaccgaacgacagagcccacagccacgaaaaacgcaccccaaacggccgggccgggaacccgaccaccgaggcgcagcacccccaagcagcggcgccaggggcgcgggaccgagacaaaagcgccgcgagcaaacaaacgaaaggaaccaggaggaacgggcagcaagggccccgcaggcggggcacaccagcccacaaaagaaggagaaaaaaccagcaaagaaaggacccccagcacccgacccagcacaaccagggccagagaaaggaaaaaaggaggaaaaacaacgacaacaaagacacaagaaaaagggggggggggggggggggggggaggcaagggaccagagaagcagaggacaacgccagggggagaaccaaaagcaggcggcagcaagcccaccccaacc

SEQ ID NO: 651 - RNA, 22518 nt, Mus musculus
  misc_feature (7183)..(7340): n is a, c, g, or u
  misc_feature (9862)..(10141): n is a, c, g, or u
  misc_feature (12797)..(14230): n is a, c, g, or u
  misc_feature (15279)..(15378): n is a, c, g, or u
ccaagagaacgccacaggcgccggagccagagcccgccacaagaccaggcacgaacccagaaacccgccgccccccccccgccaccccccccccccccaacccccagggagggagaaagaaagacaccacacccagcccgaagacgcccaagggcaggcccaccaggggggggagcccccacgccccacagccggccaagcggggaagccagcacaaccaggcacgcaggccaaaaagaaacacgccagaggaccgccgccaggggcacacccaagggacacgacccacgaaaggaaaccggaagagcaagaccaacagaaaggggcaagccccagaggccaaagccgagagcgggaaagaaaaaacacagaaagggggggggggggggggggcgggacagagacgaacaaggcaaaagcacagagaaaaaccaccagagccacccagccaaccgaaaaacacaaaaaaaaccaagaacaagaaacccccaaagccaccacagaccaagaaagaagaaaagaaacgaccaggcgaacgcacgcgcagaaagccacaacaaaaagcccaacacagccgccccaggcgcccaagaagagccagcgacaagcaccaagagcaacggaaaaaggagaagcaaagaagccggagaaagcgaacaagaaggccaagaagaacaaaaaaacacaaaaacggaacggaggagcaagagaagcgagaaagaaaaaaaggaaaacaccaaggagacccaaccagaggacacgagagacaaaacaagaggcggacccacacaaaggacggaaagcaggaacaccgcccccccgccccacacccccccacccccccccggacacaaggccaaaaacaacccaaccgaccaaaggcccacaggcgggagcaggcagacaccggccaagggccgccaagacagggacagcaaaagcagaaaccgaagcacacgcacagccgagacagccacagagagagaaccgcccagggcccaggcgagcccccaggcagcccagcgccaggcaggacaaaaccggaaagagggcaacggagggggagggcagaggcaggagggagcaaaaagcagagggacccgaagaggaggaccgcaaagccccagacaccccccaagacaacaggaccgaaaacaaagcaaaaagagcagacaaaaggaaggaacggaggaaacgaaacagcgagaaaacaaccccagcaaaagcgcccccaacagggcagaagccaagaagggcaaagccaagaccgcgaagcaaaagcaagccaaccgggaggcgaaaaaagacaaccagggggccaagacagagcaaagaggaaccagagacgggagccaaagaagcaggaaaacaaaaaaagcaaaacaaaacaaaaaacaaacaaacaaacaaaaacaacaaaaaaacaaaaagccaaaaaacaggaaacgagagggcaagagaccaggggaagggaggccagcaaccgacaaccgagccacccgcaaccaagcagaaagcagaaaaagcagagccagaaaaaacaggaagaaaagaaaaagcaggagaaccaccaagagaagaaaaaagagccacaggaacggcaaacaaggacacacaccagacagggaccaagacagaaggacagaacggcacacaggcacacacacacacacacacacacacacacacgcaagcccacggaaggaaaaaacgaaaccagcaaagccagcacaaacagggcacgccaacaaaacacaccacaaccgcggacaaagcgagggccaggaaaccggagccccgagagccagaaaagccagcaagagaaaggaagaaccagggcgcacgccaacccagcacgggaggcagaggcaggcagacgagccaggacagccaggaccaagagaaacccgccgaaaaaacaaaaaacaaaaaacaaaaacaaaaaacaaaacaaaacaaaaaaccaaccaccagaacgagaacagacgcgcaacaggccacagagcaagggcacaaaacaagaacgaaaaagccgcgcccagacagacacacgagcaaccggggaagacacgcacagcagcagaagaagaagccaaccccccggaagaagaagaaagacacgaagcaagcgagacgagaagaagagcagaccagagcagaacacacagcgcggacaaaggcacgaaaaacacacagaaaaaccgagcccaccagaggaccacccagcaaccaaggcagacaaagcacacacgaaaagcaaggaaagggccccagacagaggacgcacaagggaggcccgcagaaaggggcgccaacgcaagggaaccccagaaaggggaaaacagggggaaggaagaagagcggcacaaaacaacgaaacagcaaggcccgggggacagggacagcaaaggaaagaaagaacaacaaggagcaaggaaaaaggacaggaacaagagccgacaacgcgccaagcaagacaagcaaggaacacaggggaaaagagaaaccgggaccgcacccaaaacaaaaaaccccaaagaaaaagaagggggcggagagaggccagcgaaaggcagaccacaaccgaaaaaaaaggaaaagaagaccaaggcgaaggaaaagcaacccagaaaagagcaggaaggagagggaccagggccggagcacgccagacaaaaagcaaggcgaaaagcagaaccccccagaagaaggggagggggggggggggggggggggacgcgacagcaacaaacaaaacgaggcagcagaagaagaagcgcagaaaaagccagaggagagacaaaacgaagacagacaagcacgaaaaagcaaaaagaaaaagaaaagaaaaaaaaaagaggagcaccaaccacagcaaccacaaaggggcgagagcccgaaaaacgaggaagcaggcagaaaaaggaccaccccagcaccaccgagacaaacacaggcgaggacacagaaacccgggccaaggcacaaaaaggagcgacaaggacgaagaaaaaaaaagcaaagacgaaaagcgcgagggcaaaaacaagacaccaagaagccagccgccacagcaccaaccaacacaaggaaaaaaaacaagagaaggcaaagacaccaccaggcaaaagaccaacacacaagccaagcgcaacgggcggggagaaagggccagcaacaaaccacaggagcgacagaccccagccaggaccgggaaacaagagcgcaaccaaacccagcgggagacacaagaaaaaaaaccccagcccaaacaggccagggaccaagacagacagacaaccacaccaagcagcggaaccaacgcaacggaagcaaaaaaaaacaaaagacaacagagaaccacacaaaagaaaaacagaacaacagagacagaacggcacaaagggagacagcgacagaaccacacaacgacaaggggaggaccccaaagcaaaaagaaccgggagacaagaaaagcagggcccacgaaaagaggacgccgccaagcgacgcagaccagccacgccaagacacaacgccaaacggaagaggagcaaacaacagccaggacagcggcagacgaagggagaaagaaaaacacaacaacaccacaaaagggacacaaagcgaggggagagaaaagcccacccaaccaagcgaggacaagaaaagacaaaaaaaaagcaacgaacagaaaggagaagcgcacgagccccaggaaaggccaggggcccgccacacaagagcacaaaccaacaagacagacaccgagagggacagcgaaacgacagacaaccccgagaagcacgaaagagggggaagagagacgccccgggcacaaaaggcaggaaaccaaagagcaaagagaacaggggggccgaacccagaacgagagcacagggagagcggggggggggcccaaaaggggaaaaggggaggaaacaacgaaaggcagaaaaaagcaacggcgaaagccagcggcaagggcaagcgcagggagccgaggccaacacaggacgcgaacaacaggacagcaccccaacagaaacaagcagaccgacgagacacagaggagaacaaaggacagcaacacaacggccagcagaaggaggcacaaggcaaaacaagaaaaaacaccacacaaaacaaaagcaaggcgacaaagcgaaaaaccacggaggaggccacccgggccggagcggaaggaagcacgaacacccaacccaccccacccccgggagaacaccaaaaaaaacccaagcgcacggggagggccagagcaggagcgcaagcacaaacacacacaagcaaccgccggagacggggaaaccccccagggaacaaacacgggcacaaccaccacaagcaggcagcgggaagaggggcaaggccagggaaggaggacaacgcacaggaaacaaccaaagcaagcacagcagaaaccgccacggaaaaagaccaagcacaaacccgaagcacaacacgccccaccggccccccagagcccccgacacggcacacaaccgccacaagaggcaacgcccagggagagaggcaaaaaagcaacacagaaacaaaccaaaagggaacagacaaaaaacagagaccaaaaacccacaacgaaggcaaccaaggggacaagggacaaagacaaagcagcccccagagaaaaggagcgggaaaccgacagaaaacaagaacagaacaacaaaaaaggcagagacagacgggggggaagccggccgcccggggagagaggagaggagaagaacaacggcagaaggcggcccgacaagaggcgcaagaacggacagaccgacgagcacagacaagagagaagagccaaagagcaaccgggcgggaagaaaaaaaaagaacaaaacccaacagaaccgagccgaaaaaaaaaacaaagcaaggcggaaacgggccagggcgagaaacaaggagacaagaagagacacagaacaaagaagccaggcagcaggagcgccaaacaagccagaggaagagacaggggaccggagcaagcaacagcggacacaaggacccccaacccagacaagacccgccaagaaaaaagagaaaggcagcccggcccacagcaacacaaagcacacacaggcaccccacacagcaagaacaaaacaaaacaccaacaaggggcaaagaagcaaaaacagaaagcaacaaaacaagaaacaacagagaaaaagaagaagcacagacaacagaaaaaacagaagggacgccggcccgagcgccgagaagagccccaagcgccaccaagaaggaaggacggacccacgcaccacgagcggcccacaaaagaggacagcaccagccggccccagaagcacaggccacgcacaagacacacagcacgcaccaaagaagcaaccggagaggaacacgccagaggcaggaagccaaacgcgaagaaaaaacacacggaggcaccaaagaggggccaagacccaccacgcccccgcaaccaaaaacaaaaaaggaaaacacccagggaaaggggaaccgggccggcaccgcggcacgaagccggcgccgacacaagggcggcggcagccccgcacggaaccccccagagccagaagcaccccgcagcccaccaaacgggcacagaaagcgccacccccgaaggggagcaaaaggccaaagagaacacggcggggcaaaacgaaagagcaaaagcgagagggacacacgcaaagggaagagagacagcgaaaaggcacgcccgagccccggccccgcccccccaccggccgagcaaaaacaccaagcagcaaagcagcagcgacagggcaagagagccagaaaaaaagcaaaacaagcaagacgaacaaagcaaaaacacagagcgggggcggcaacgaaaacgacagagggcaagaggagcccaggaagaagccccacacacggccgggacagccgggggacggacgcaagaagaggaagcccgcccacggggcgggcgccaggcagggggccgggccaagagagggaaccgagcagcaagcggaaaccccgccccgggcgcaagaccgccggcccccagggagaaccaagaacaggaaagaaagcccccccaaggcggagacacacgaaggaacaaccaccacagacagaaaagcaagaaggccaaagccgaacaagggacaccaggagcgaagaaggcacaagcagcaccaacaacccaacgcacaacaacaggcagggcacaggaaagcgagaagccgaggaggacagggggcccccccaggaaaaccaaggaagggaggcagcagaggaaagagaaccaggacaggcacgggcaaaacaaaaggacacgaaaggaaaagaagaggcagccagagaaaggcgcagaagcagcaaaggaaagaccaaacccaggaggaggccaagggaagcaggggaagaccgagcagaaacagagcacacaacagacagcccacgcccaggcagcaggcacccgcacggaaaaagccaaacagacaagacaagcgaaagagaccaaaaaacaaaaaacaaaagccagcgcaaaagcagcaagaagcaacacaaaagccccaggaaaccccaaccacacccccccccgcccagagggcccccccacccacccacccacccgccccccaccacacccgcacaggaccaaggacccccccacgagcccgaaaggccacccgcacaagggcggagccagggccccaagaccggggcgagcccgggagccgggggcagcgggggaagcccagggggcaaacccacaccccagcccaacccccaggggacccaggccagacaaggggcggagcgccacccgcagcaggccggcagaaccccaggagacagccaacaggcccgcagcaagagcggcaccacaaaggggggacgaagggaggaccccaggggacagccggaggcccgccagcgcccacaccgccgaagccccagagagcccaccaagaaggacaaagcaccacacggccccccgaaccaggacgaaaaacggaccaagcgggcaaacacacaaaggcaacgaggcggcgggacccaccagagaacagccaccagcaagaaaaacagaaagcgagagacccaggaaaacccacacgaccagcccggaaagacgggcccaccggcaaaaaaaggcgcagaacannnnnnnnnnnnnnnnnnnnnnnnnnnnnnnnnnnnnnnnnnnnnnnnnnnnnnnnnnnnnnnnnnnnnnnnnnnnnnnnnnnnnnnnnnnnnnnnnnnnnnnnnnnnnnnnnnnnnnnnnnnnnnnnnnnnnnnnnnnnnnnnnnnnnnnnnnnnnnaagaggccagccagcaaggcagagaggcacaggacacagggaggcggaagagaaagaaacgccaccccaagggacgagaagcagaaagagagaagagagagagaggagagacagagacagaaacagaaacagaggggagcacaaaagccccaaaagcacccgaaccaaacaacaacccccacacacccaccaaaggccaggcccagaggccacaggcggccccaaaccagcaagcgagagaacacaaaagacgaaaggcaagaagcaacaggagacaaacggagccggcgaaaaaggagacgaaacaggaaaaaagagccgcacacgagaggggaggaaagaaagagagggaaccagcgcccagaaaccagagacagaaggacagagaccacgcagaacagaggaggccgaggcaagaggagcaaaccaacacggcgagcagagacggcaggcccaaaagagagaagggagagcaggagggaaaacagagaagcagcagagacccacgcaagggacgcagccgccgaacacacacacagcaaacggcaagccagaagcggaaagccaaaaagccagacagccagacaaaaagacagaaagaaaaaggcaaagagaaggcaaggggccaaagaagaagcaagagacaaggcaaggacaccaggccgcccgagagcaaagccccacacaaacacaaaaacaaaggagaggaagcggcacaggggaaccagccagagcacagggggaagaccaaccaggaccgcaccaggcaagggcgacccagagcaggcccaggccaagagccaagagccacggccaggcgcccagaaggaaggaacgcccggaggggcgggaagccgaggagaaagacgagaaccgaagggaaggggcagggcgggcagagacaagaagaaaaaggccgaagagcaggaagagcggagaaggggggccacggaggacagggagggaagaccaccggcaggcgccggcgcccaggcgccaagcaaacacaagggaagagcccccaagagaagcccagacccaaaacacgaggggggaaaacacaccaaaaccaacaaggggggcaccgaagcccaaaaggaaaaagaagcaagacaagaagccccaacagcaagaacgaaaccaaaaagcaagaaaaaaagcagaacccaccccagaaagaaaccagcaccaacagaaaggcacgaggaacagggggaaaagcggggcgggcgaggaaaaagacagaggagggagaccagacaccccccaacaaccggcgaggggacaacagcacacaccgggggaacgcggcgacaccaagggccggggggaaaggcagaagcccgaaagacagacagagccaaaggggaaggaaggaaaaagagggaaaagaagggcacaagacccaagcaggaaggagaagacagagcgagaagaaggaagcagggagagagggcaagagaagagccacgcccagggacagggggcccagccagaaaacggagaaaaacccacagaaacaaacccccgcacaacacacacacaaacacacacacacacacacacacacacacacacacacacacacacacacacacacagaggagcaggcaaacagcacacagcagccgcagcacacacaaccaccacacacacacacacacacacacacacacacacacacaacagaaaaccacaagaaaaaaacaggaacaaggaaaagcagcaagaagcgcgccagccggagacagaggaaggggaaggaaggaaaacaggaggcaggacgaggccacgcaaaggaggggggagacaaggagaggggcggagaagcacgaagaaccacagagggagaccacagagacaggaaggaaggacaaaacaccacgcaggccgagaaaccaagaagaaacaggaagggccgaagaacacagagggagaaggggcaaagggagcaagagaacaccgagaacaaacaaagcaccaagaggggagccgagcgaagcaaaaaagccccgaaccgagccggccgaaaaacaagcagcacgccgagccccagaagaggggaaaagggaagacagacgggcgaagcgcaagaaaaaaaaaccagaaaaaagaaggaagagacgcaaagcaacaaacaggaaagacaaaagaacgcagaagagagacgccaacaggaacagagcacaacaacgagaaacaaaaggggaaacgagaaagagaagcagccccagagaaagcaaagaacgcacaagaccagaaggaccccgaagccaaagaggccgggacccgcaaagaagccaaaaaaggcaaacaacgagagaggcacccaggaggaaagaaaaacacggccaggcccgagcccagaacaaaggaccaacgaaaaacccaaccccagggggcccgaagagacaaaacaggcccagcacagcagaaaaagaaccagacccacccagccaggccagacaccaggcccagcccacccccaggccgccaccacaccccccccccccgcagcaccnnnnnnnnnnnnnnnnnnnnnnnnnnnnnnnnnnnnnnnnnnnnnnnnnnnnnnnnnnnnnnnnnnnnnnnnnnnnnnnnnnnnnnnnnnnnnnnnnnnnnnnnnnnnnnnnnnnnnnnnnnnnnnnnnnnnnnnnnnnnnnnnnnnnnnnnnnnnnnnnnnnnnnnnnnnnnnnnnnnnnnnnnnnnnnnnnnnnnnnnnnnnnnnnnnnnnnnnnnnnnnnnnnnnnnnnnnnnnnnnnnnnnnnnnnnnnnnnnnnnnnnnnnnnnnnnnnnnnnnnggggagcaaaggcagaagagaggaagaagaccgaggggcaccggaacagaagaggaaacagaaagacagaaaaaacacaaaacagacgcaggacgaccccagggcacaggagaccaccgaacaaccccaagaaaagcgaggccaaagcacgacagagccagagggaccggcgcaaggcaccacacgagccaagcaggcggagaccaccaagaaaagcggcaggaagagcagcagaggcagacgcaccaggagagaccccaggaaagcagaacccaaacccgcgcaaaaacaacaaaaaccaacagaggagggagagggggaagggagggggagagacaaggagcaagaagagagagggaaagcgggccaagcacgcaggagacaagcagggagcggcacacaaacaagaaaaagcacgcagcaacgcacaccacccccagaaagccagaagcaacacaaaaggaaggccaaagaacaaacacagaggagaccacacaggggaggaggaagggaacccgagcggacaccaaagcccccacaaaaaaccacacggaacgaggacacacgagaggcaccagaagaagaaaaggggggaacgcagagacaccacggcccgagagacgaagaggcaagaaaaacaacaccagcccacacagcccagcagagggaaagaggccccagccaaaaccaaaggcggcggcacacaggaacgggcgagaagcgaccagaccaggccccggacaccgccccacaaggaaaggagcagcccaccaagggcaggacaaggggagccaggagaaggaacacagcagccaaaaggagcggcaaacccagccggaagaaaaaacgccagcgcaaggacaagaacagccggaacacgacacaaaagcacaaaaaacagcacaagacacagagggaaaaacacgaggggcaaaaacccaaagaaaggcccagaagggcagaaacaagcagaaaaaagacaggaaagcaaacaggagagagcacagggacaccaaaaaccagaaacagaaagggagccaagggcaagaggagggaagggcagggaaagagccgaagcggagaccgaacaaacccagcaaccagaaaagacaggcagcgcaagccaagcagcacgagaaagagacaaggcagagaagggaaaccaagagccacggacccacaaagcagaccaggagaagaccaaaccacaaggcagagaccaaggagaaggagccccgaccaccgccccgcgggacacgcgcaaacaggcacacagagcagagcacacacacaacacacaagacaaaaagaagcacaggaccaacaaagagggcgacaggaaccagagagaaaacgaaaaaaacagcagcgaaaaacaacacaaaaaccacagcagagaaaaaggggaaagagacccgccacaaagggaggggcacaacaagaaaaaaaaaaacagcaggcaggggagccaaaaaagcaaacacgcacagaaaaacaaaaccaaaaagaaaccgaggccagagaaccagaaaacagcacacggccgggaaggcgaagcaaaagcagagcagaaaaacacagaagcacaggcgcccaggcaacaaaacaaagagagaaaacgaaaccgaagaaccaagcacaaaaaagccaaaagaaaacaggggaagaggcgaggaccagcggaaggggagagaggaggaggaaacggggggggggggggagggggagaaaagggagcaaacaggaaagaaaaagaaacgccagcaaaaagagcaaaaaaacaaaaagagccgggaacagcaacgcccaaacacgaagagacaccgaaccgccccgccggaaagggcgaaaagcagaccaaagagcgcgcaagagaggacagagagagcaagcaggaaaacacaaacgggaacggaaacacccggcccaagccagcagacaaggacccagccgaaagggccaagggggaacacggccaagcccaaacaaccaagacggaagaaggaaagaagccgcagccccccaaaggacggggccaaagaagaaacagccaccgccacaacaagaaaccagccagggagacggagagagaggcgcccaggaacacagacgaccaaaggcagcgcccccccaagacacccccaccgaaaggacaagcgggcccaagacaaagcaggcagacagcacagggacagcagcggacggcgccaaggacaccagggcgaagcaagacgcaaagccacaagacgaaccagaggaagggggaccgagagggaccgagggaaaaagacaacaccagggcaggagcgaggaacagaaaccaagagccgaggaccccagacagcaccagcagagacggccaggacagcaggcgagccccagggggacgagcaaacacggccacccacaacgcccacaaggcacaaaaaaccgcagcaagagccagccaaacaaaaccaaaccaggcagcaagaggaagaccgggagaaaagggaaaagaacaaccccagacaggaaggagacggagcccggcaaacaaaaacaggaaaggaccagaggcgccgggcccgcaagcgaagaagaggcagacgggaaggacagagccaccaccggcacagccccggcggagaagagcaaccaggccccaccgcccccnnnnnnnnnnnnnnnnnnnnnnnnnnnnnnnnnnnnnnnnnnnnnnnnnnnnnnnnnnnnnnnnnnnnnnnnnnnnnnnnnnnnnnnnnnnnnnnnnnnnnnnnnnnnnnnnnnnnnnnnnnnnnnnnnnnnnnnnnnnnnnnnnnnnnnnnnnnnnnnnnnnnnnnnnnnnnnnnnnnnnnnnnnnnnnnnnnnnnnnnnnnnnnnnnnnnnnnnnnnnnnnnnnnnnnnnnnnnnnnnnnnnnnnnnnnnnnnnnnnnnnnnnnnnnnnnnnnnnnnnnnnnnnnnnnnnnnnnnnnnnnnnnnnnnnnnnnnnnnnnnnnnnnnnnnnnnnnnnnnnnnnnnnnnnnnnnnnnnnnnnnnnnnnnnnnnnnnnnnnnnnnnnnnnnnnnnnnnnnnnnnnnnnnnnnnnnnnnnnnnnnnnnnnnnnnnnnnnnnnnnnnnnnnnnnnnnnnnnnnnnnnnnnnnnnnnnnnnnnnnnnnnnnnnnnnnnnnnnnnnnnnnnnnnnnnnnnnnnnnnnnnnnnnnnnnnnnnnnnnnnnnnnnnnnnnnnnnnnnnnnnnnnnnnnnnnnnnnnnnnnnnnnnnnnnnnnnnnnnnnnnnnnnnnnnnnnnnnnnnnnnnnnnnnnnnnnnnnnnnnnnnnnnnnnnnnnnnnnnnnnnnnnnnnnnnnnnnnnnnnnnnnnnnnnnnnnnnnnnnnnnnnnnnnnnnnnnnnnnnnnnnnnnnnnnnnnnnnnnnnnnnnnnnnnnnnnnnnnnnnnnnnnnnnnnnnnnnnnnnnnnnnnnnnnnnnnnnnnnnnnnnnnnnnnnnnnnnnnnnnnnnnnnnnnnnnnnnnnnnnnnnnnnnnnnnnnnnnnnnnnnnnnnnnnnnnnnnnnnnnnnnnnnnnnnnnnnnnnnnnnnnnnnnnnnnnnnnnnnnnnnnnnnnnnnnnnnnnnnnnnnnnnnnnnnnnnnnnnnnnnnnnnnnnnnnnnnnnnnnnnnnnnnnnnnnnnnnnnnnnnnnnnnnnnnnnnnnnnnnnnnnnnnnnnnnnnnnnnnnnnnnnnnnnnnnnnnnnnnnnnnnnnnnnnnnnnnnnnnnnnnnnnnnnnnnnnnnnnnnnnnnnnnnnnnnnnnnnnnnnnnnnnnnnnnnnnnnnnnnnnnnnnnnnnnnnnnnnnnnnnnnnnnnnnnnnnnnnnnnnnnnnnnnnnnnnnnnnnnnnnnnnnnnnnnnnnnnnnnnnnnnnnnnnnnnnnnnnnnnnnnnnnnnnnnnnnnnnnnnnnnnnnnnnnnnnnnnnnnnnnnnnnnnnnnnnnnnnnnnnnnnnnnnnnnnnnnnnnnnnnnnnnnnnnnnnnnnnnnnnnnnnnnnnnnnnnnnnnnnnnnnnnnnnnnnnnnnnnnnnnnnnnnnnnnnnnnnnnnnnnnnnnnnnnnnnnnnnnnnnnnnnnnnnnnnnnnccggggaagaacaaaccaccacagggcaaaggaaaggcaggccagggcagggagaacacgaaagaaacagcacacaaagaaagaacagaagcacgcccgcagcgagacagcgagagaaacaccacagcaaaagcaaggggagaaaaggcagccgccacagcagccacacacaaaggaagcaggacaggaaccaagcagggcaggaacgaaggcaggagcgagcagaggccaggagggggcgcacggcccccggacagcgcccaagaacccagacaccagccagggaggccacccacaggaacggaccacccgcacacaaaaggacagccagacagcgccaagcaaacaagaggaccaaggaccccccccagacgacgcgggcaaggcaaaaacagccaacaagaacacgaccaagacgaacaagaacccaagccaggggcaagagagccaggagcgccaacgagaccagaccaaagaagaacaacaaaaaccacgagagggcaagacccccaaaggcccaagcgcccaaaccaaccaacgggccccccaacaacacaaaaggaaagaaaacgcccacaggcgccaacaaggagaccaaaaaggcgcagcagggcaccgcacaaaacacagaccaagaagaagaggggagaagggaccaacagacagcgcacaccaaaggaagcagacggaaccaacagaacgaagcagaagagcagacgccaggacaaagacacggcgcccccggcgcggacccggacaacccagaacaccagccaagggggcgccaccacaagggccccccaccgacacaagagaaaggccacagcggacccaaggaggcccccggaaacccagcagcaaggacacacaaaaccagccagacaaggccccaaagacaagggcaagaaaacaggcaccacagagaaccgccaacaacacacaaaaccacgaaaccaaaccccgggcacccaaaacaaacaaaagaaagacaacaaaaaacacaaacaaaaagcccaagcccaaagcaaacacacaacaccaaaaacagnnnnnnnnnnnnnnnnnnnnnnnnnnnnnnnnnnnnnnnnnnnnnnnnnnnnnnnnnnnnnnnnnnnnnnnnnnnnnnnnnnnnnnnnnnnnnnnnnnnnaaaaaaaaaaaagccaccaaggaaagaacccgagacagacacagcgaacaaccaaaccaaaccaacgaaaaaccagaccaacacgacaccccaaaccccggccccaaaaagaggcacgccagccaccccgcaaacacaggccccaggcccaacggcccacgcagcgcgcgcgcggggcccccaggacggaccccaaaaagaccccagccggaaaaccgacaccggggaccacaaaccaagcaacagcacaagagaccacgggcaagcgaaaaaacagccagccagcaaaaaaccccccccgaaacgaagcaaggaccccagggggaacccaaagcgaaaaaaaggccaagaaccaagggcaagggaccagaaacaaaagagagagggaagacaagggaaaagcacacgcaacaacaacaacaacaacaacaacaacaacacacacaccacacacacacaccgccgcgacccaaccagaaaggaaaaaaaccaagcacgagaaggcgacagggaaaaagggcggaaaaaaacaaagaaacccagaccccacaaagagcaaagaggagccggcaaacccagaaagaaaccaaaacaaggccgccgcgcccgccccgccgccgccgcccgccgccccgccccaaaaaaaaaaaaaaaaaaaaaccaccccaccccagcagccaggaccgaagcacgccaagaaggacccacgaagcccggacaccccccaggaaagaccaggcagcgagaccagggcgagagcaaaccaagcacaacgggggaacacaccaaccagccacgccaaccccacagaaaaaaagcaacaccaaccagacaaggacaggcggggacaaagaggcaaccagcgcacaaaagagggaaacagacaaaccgaggaaaaacaggacaggcagggccaaaaaccaagagccaaaaaggagaaacacaagagaaaccacagcgccaaaggccagaaaaaccaacaggacagagaaacaaagagaggaacgagagcgacacggaccaggcaaagccaaacagaaaagggaggcaaggcagcagcgcgggcagcggaccacaaggcacccacaacgcaacgggacccgccccccagcaagaaaaagccgaaaccaccagccggagaagaaccggaccagggagcgacccgggaggggagaagagagccaaacaaaagccaaagaaaagagcgagggaagagaaaaaccaagagcaacaccacggagacaaaggaacaacagaaccagcccgccggcaaaaggaccacagcaaagaggaaagagaacaaggaagcagcccaagagcagaagcaggaaaggaagggccaacaaaccccgaaaaaagaaacccacagcgccaccacaaaagaaaacaaggaagacgaaaaagcaaggcggaacgggagggggagagggaaaagggggggagggggggagagggaccagaaccacacgggagagggaccagaaccacacggggggccagaacaaagagaagccaccgacggggacagccggagaagggaggcgagggccccggcaaagagacccagaggccgagcgccaagagcaccaaggggagccacacacagccaagggagcgaggacgaaccggcagagcccagaaaaagcacacacgagcaacccgggaaacaaggaccacggagcagcgcccgagccaggcgaccccaagcgcaagccggcccagcccgaaggcgaaaagccaccccggaagcgccagagacaccagggagaggcaccaacaacaaaaaggcgaaagcacagaacagcagcccagaagaccacagacccaaaaaacagaaaagaaaccaaggaagacgacagacccgagccggaggaacagaaccgggaaccacaaagcacccgaaacgcaaaggagagaggcaccaaagagaaaggggagcggcagcggacagagcaaaaggagcagaaccaaagaccccccaaacaaaggacaaaacaagagaacaaaaaccagaggaaagcagcaaaaccagaacgaaggacaccaagagcccgccacaacacggggagagaaaaggggccacccgaagcaccgaggcaccagaagccaagcaggaccccacccaaacaacaccccccaccgacgaccaagagagagggccgccacagagggggaccacggggacggaaagaacccaggaaccgcaagaacaaggccaacacgagccaccagccccccaacacaaacaggagacggcggagaaagacccaagaccgggcccggaggccagaagagggacaacacgaaagggggacagggggaagccaccacaggggcaggaaggaaaccaaagccgcgcaggagaaagggaacacaagcaaccaagccagcccaaagaaaaaaaagacacaacagagcggaaagcgccccgggacaccagggcgacccggaggccagaagagggcacgagcccgagcaaaggcaggcagggagccacaaacaagggagcggggacgaacagacgcaaacaggaagcccccgaccgagaaaccccccccccggcaccacccaacacccaggaacccaaaagaccaagaaagccaccacagacaagacacagcgagaacccaggaaaagccccgaagggcaaaggaaaagacccagccacacgggccccacccgacccaccgagccgaccaagcgccccagcggcaacccagcaagcaaaaaaaaaccccagccacccgacaggccaaggacccagggaaaaagcggggcgagcaaaaggcgcagagagggcagaaaagaccaagcccgaaagccacaacggggggaggagggaaagcacccaacaaaaggcaggggaccagggggccgcgcaagggacggacaaccaaagagaaacagccggccggaagcagaggcccgggaccgaaaaaagcccaaccccagaacagaggagcccgacaaacaccacacgaagccacccaacccaaaagccagcgagccaaccacaaaccaacgggacacgcacaacacggaaaaggaaaaacggcaagagccacgcgccccagcggccccccagacaggggagcacgcagccgggaggcacccgcccggggcacagaggcaaaacggaacggagagaagagaggagcgcgcgcgcgaagccgccccccagcgcggcagggcaccaaaaaaccgaccacccgcccccaccaccccgacgcccacacccacaccccccaccccacccgcccacggagcccccacaccccaccccaccgacccaaaccccggggccccagcgaaggagggcacaccgaaaaagacagacccggaagcccacgaggagggggccaacagcgggagcgcgggggcggggagagacgggggccaggcagagacgcgcccccgacagaagcccccccagccagccccaacaacaacaggggcagcgccgccaggggggcaaaacgcacgacccagccggagcccagagggcaggagaaggcccagaagcgcccaagcccaggaaaggcaggccgggaccccccgagcggacccacgggccgcacggacccaccacaggcccccaccacccgaaccagacaagaacaaagggcagagggacagggagaaaccccaccgcacgagccgcacgcggaggcaggcaaaaccccgcaggcaggcaccacaaggccccccgagccgagagcccaccccaggccggacacggggccccccccaaccccacccgagggccgacaccgcggccccagagccagccccccccccaccccccgcacccaaacccagacaggccccccacccccccaccccagccccccaggccccccccccacggagccccccccaaggggacaagcacccacgggcaccagcggaacgagcgggacgacgggacgacggcaaaccacccaggagacaacccaaccgggcagggcaaaccaacaccccgggggaggagcgagcaaggaggaagaaagcacccaaaggccccgaaggcaagcaaaaaagacaagcaaaagccaggcaggagcaaagggcggggggggcacagccggaccaaaacgagaagacgaggcaggggaaaggaagagggacgcggcccacaagaaggcacgaccagaaacacacacacacacacacacacacacagagagagagagagagagagagagagagagagaagacaaaagagcagcccgaaaacaccaccggcgagcacaaagaagccagcaagaaaacacagcccaaaaagggacaagcaggagagccagaaagccagcacagccgaggaacccggaaccaggacaaaaccagacgcgcaggcgaggaggcccacaggacacaggcgagccggaacgggaggacccgaaagaagaccggccggaagagcccaccgcagaggcaggacacaaccaagcagggaggaaaagacaccagcacagcggccgacgaaggcacagaggacgaacggcccgccgaaaaccggaccacgggcccgcgcagccggccacacagagacaacaagaaacaccccaagcggggacagccacagagagcccaagcaagagaaagcccacacaaggcagagaccggagcacagaccagagaccgaaccaacaccaagacagaaggaaccaacacggggagaggcgggaccggggcacagaggaagagaggaagcaggagagagaggccccggagaggaaggaggacaaaaagcacaaggccccagcagggggaccacaggaggaagaaaaagacaaagaaggaaggcggcccagaggagaccacgcgaacaagggcccacggggggggggcaagagagaaaggaggcggcaaagcgaggccgaggaccacaaaggcggagggagaagcacgaagcaggggcagccaggggaacagggagcggggaagacacaggagcgggccagcgagcaaagagaaacaggaggcagcgccaggcaggccagccaccccacgggcagaggccaagccggggagagcgggaacaggagcaaacccacaacaagcgccaccacacgggccacacaacgggccaacaccaccgcccccccccaggagagaaggcaacccaaaaaggagaaagaaaggaagacaaaccaaaagagaaaaaagacaaaaaaaaaagacacacaaaacacaggaggagacaagaagcaacccgcagaggaaagaaacaaaaaaaaaacaaagaaaaagaaaagaagggaaagacaggggagggcacgaagcgcggcacagggaagaggccggagcaggaccccgccccacaggagcaggagccccccccaaccaggcgagcgaaacaccaggcagccgagggccagcaggccgacccacagaggcaaacaggggggggagacaggggaagaacggaacgacagccgggagaaggcaacaacaacaaaaaaagagagccgcgccacaaagcccagggagaaagggccaggagcgccaaggccagaaacacaggggcgccggaacaaaagcaggcaacgggggaccaacggggggggcggggggggggcggaagaaggaaacgaacaaggcagagccacccaaggagggaagaagagcccaccacacccagaagccaacacacaccagcccaaaaaaacagcgcacccagacccggcagaccaacacgggaaacccacggagcacagagggacacgaaagaagaagagagccgcaccacgaggaagagcgcgggccaagaacccaaaagcacagcaagagagaacgaccccaagaaacggggcccaagaaaaacaagcagcacagagagaaacaggcccagacaaggacgccgaaccaaacagcccacaaagccagagaaagcgcgacaacgaaccacagcaagcaaaacaaaggcaaggagacgaggcaagcccccccccacacaaacgcaaagcacacgggaaaaggagaaaagacacaaaccacccaaagagccagcggggagcaagcaagcgagcgagccagagcacgcaaagccgggaaacaggcccagaaagggcgggcggcggcaagccgggggagccaaaagcaaaggggcgaccaggccaggcagccaagccgccaaggacggggaaaccccaggaaaccacaagcgggaagagcaagagagcacaaaaggcaaaccggggcaaccaacccaaacagacaacagcagaaaaagagccgcgccagccagagcaacgagggaggcgaacaggaagaaagagaggaccgaagagccacagaaagccacaaaggaccacacaacaagccccgcacacaaacgcacagcaaacaaagccacgcagggcggcgaggcagagagcggccccagaaccacaagcaacacgccagcgccagcaaacaaaaggccaccacgaccaaagagcgaagaaaaaacaggccaacagcggaaaagccgcagggggagccccacaacaaacaagcagccggaagcagcgaaacaaacggagaggacaaagaacagcgcggaggcgcagcgccggaccggacgagaaaggcgcccaacagcacaaagaagcagcggaaaaaaaaaaaaagagaagcgagcgcccacaaagcgagcgcgacggccccgacagaggaaagaaaaaaaaaaaaaagcaaagagcgagacagcccaggccggcacgcagaaaaaacagacgccgaagcgggcccgccagacacaaaaaaaaaaaaaaggaaagaaaaagcgcaggccagagaaacgcgaggaacagcagcaccagacagcgacgagaaaggcccaagcgggcgcggcgccgaggccaaagcaaaggagcggagaccgccaagccccgaggcccggggcagagaaagacgcaggcaaggccaccagcgaaaacagggaggaaggacagggggaggcaacaaagcccagcacaaagacgcacaaaaagccaaaaaaaaaaggaggcgcccggcaagcaggaaggccgcggaacacaaaggcggaaagacgggacgcccacccccacacccccgccgaaccagaaggaaggaaaagcccaagccacccgcccaccacagcggcaggccagaaggcgagggaaggcaaagaaa

SEQ ID NO: 652 - RNA, 13798 nt, Mus musculus
gcgcgccaagccggacaaccgagcaacccaagaccacacagggagggagaggacgacgcccacaaacggccccgacagccccaggaggcagaaggcccacaacacacacacacccaacacaaaaaaaaaagcaaaagagagaggagcaccaggaaacaaaacaaaacacccacagaaacaaacagaagcacaggagaccgacacgaaagaagccccaagccgcaccaggaggcacaccgccaggagaaaacgcaggaacggagggaaaaagcagaagcaaacagagcagaggcagcccacaaggcagacggagcggaagcacacagcaggacgacaggcccccgcaagaggaggacgggcggagagcgcagcagcgagaggagccggcacaggagaagcggcggcgcccgcccgcggcccccaggaggccccccccaagggccgaccaacacgacaaagaaaaggaagacacgcgcccgaagagcaagcgagaaaagaaagggaggaaacccaagaaaagcaaaaagggagaacaaaaagaggcgacaagccaagcgcccaaagcgagggacacagaagaaccaggcaaacaaagcaggaacccccccaaaaaggaccaaccccaggcgagggaagaccaggaacgcacacgccacagacaaagaacaggaaaaaaaaaaaaagaaaagaaaaaaaaaaaaccaacagggcggggggagccagggcagagccgcccagcacgcgaagaagcccgagcagccaggagacaaacggcaggggaaacaacgaaagagacagaaggaccgaaggcaagcccccagcagacaggagcaaaccggccagccgcaaaaccgccaaaacacacagaagcaagcaagcagcagcaagcaagcaagcaagcaagcaagcagcacaacaaaacaaaacaaagaaaaacaagccgcagacaaaagccaccaaaaaagggcagcagggaggcggagacaaaccccgaggccgagaacagaaagaaacaagaaaacgagcccagaaagccacaccgggacagaccgaaaaggagaagacgcaaacccgggaaacaaggggaggggaacccaaagcccgcccagagccccccgacgacagaaaagcaggcaaaacagcccgaggccaggcgacaggacaggcccaacaaaccggacccggacgagcccagcggggagcgccggcccgggcaaaagagccgaccaaagggcacacggggcggcgcagggaggcggagaggaccgcgacagacgcaggagaagacgggacccacccggagagcggcaaccaccacaacacagaaaagcaggaccacagggagggagcgggccagcgccgaggggcgcccgcaccccccccgacgcgcaggagcggcccggccgagccaacccacgccgcccggaccccaggccaacagacagcaccccagccagcgaggcccccgggcagaaccaagcagcgccccggacagagcccagccgcccgcagggagcgccaaacacgaacccagggcacggaagaaagccacaagaggacagaacacccaagacaagcccggggcggagagaagaccagcaacgaggggggaaaggcacacaaagaagcagcaccagaaggacggcagacagccaaagaaaaacagaaagaacaaccgggcgcagcaaaacgaaaaagaaaaaagaagcgaccccccgcaaccccccccccccaaccaggccccccccccccccccaaacagggcagccggcagaaacagcccggaaccagagacaggcggcccaaaccacagagacaccgcaaagggggaaagcagggcaccagccaccaagcacacacacacacacacacacacacacacacacacacacacacacacacaaaaacagaaaacaacgccagcgacagaaccagggcaacaacggaagaaaaccgagggagggcgcccggagaagaccggccccccccagaaccccggagccacagcgcaggggaagccccgagccccacgagcagccgcgggcccgcaaggggaaggccaggaccagacacggagcaagccggaggcaggacacacagcacagcaaacccagcccggccacagcccggccccgaaggccccggccccaggacaggaaggggagagacagcgggcgggcacacccggggggcagcaaagaccagagccagagccccgcccgccccccccaccagaccaacaaacaggaaggaaaaaaacccccaaggaaacacaacaaaaaggaaagaaaacacagccccccgccacggggagacaggaggagacccggcaggcggccagccggggaccacggccgcgggaggccggaagcacggaaaggacgcgcagcagggaaaggacacaaggcaccagcaagccggggagcggacagagcggcgaccgggcaggggcggggccccgaccggaggccccagggaccggaaccacgacccccaagcagacccaggcaaagaaaaaagacccaaaaaaaagagagagaagagacacgcacgccagacacaccagaagagagcacaaacccaacagaggggagccaccaggggccaggaagaaccaggcccggaagagcagcaggccaaccacaagccaccccagccccccacgccccccaaagacacgggcggaaagaccagggagaagcgcggaaccaaggccagagcggccagcagaaagaaaaacaacaacaacaaaaaaaaaagacggaaagcgacgaggcgaacagagaaccgcacgcccccaccggaaacaaggagcgcgggcacaggaggcagagggccacgggagcgggcccccacagaggccagccgaaccaggacaggcggcagcaagcacaccgcgagcccgcacaagcgaaccgaccaaaggagggggaagccacaacaacaccaacccgcagcgcaccgcacggggacaaaggagggccgaaggaaagcaagcacacccgaagcaacacccgaccgaggccgacagcaccgcaccggccacgaaccgggggaaacagccgggcccccgagggccccgaggccaggcagggggaccggaagccagccgcccgaacgggcggcccggcccgcaccgcaggggcccgcccagaagccgagacacacacccgcgacacggcccccggcggggccaggccgcccaaccccgagaacaacacacggacagagcaaagcaagggcccgggcagcggccagggaagcaggaggcccaggaccaggcagggcaggggcggggagagcgcacaggggggacacaccagggcccggcccgagagcaggcccccgagcccccccgagcccccccccgggagacagggccaacaagccggcaccggaaccaccgagacaggcgaccgaaccacagagaccaccgacccgccgagcgggaaaagaccggccaccagcggcacaccaggcgaaaaaggcgcagaaacaggcagacacgaccccagccgggccgacggagccccgggcacggaagagcccacagaaggccccagggcagggaggcccgggacacagcaacaggggggggggcacacacggggaaccaccaggggcgagcagggcgaaagaaggcaggaacagagacagaaacagagccagagcggcccagagcgacggggaaaagccagggacagaggacaaaacacccgcaggacagggacgggcaaagagacaggacagcggggggggggggcaggccccggaaacaagccggagacccgggcacgcaacagagcgaaacagacaggggggccagggcgcaggcgcaaggacggcagaagaaaacggcagagaacagagaagccaggaagaagaaagggggcgcagggaggggacaaaaaaaaacacgggagagcagcccccagaagggcagggcggggccaggacccggccaacacgaacaggcggcgggcagagcacaggcaggacacaggcaaaacccagcacaccgggccgacggaagcagccgggccgccccgaccacgcgcaggagccaggcagcgcgccgggggaagcagggggaacaggacccaaggaggaaggggggccggagggaaaaggaacagaaaagagggagagagaaggcccggggagggggagacaaagaggaggcagccaggagcaagggaaaggaccacggggggaagaagagagagaggccagagagaggggcaggggaggcccagcaggaaacagcgacacccgggcgaaacacggccggggaagcagcgcagcggcgccccgcaaccccaaccacaagaagccacaggagcgggcggaaggaacgaacggcagggaacacagggggggacgggcgccaagagaggaaagcaccccagaacagaagcgcgcgagagcagcaggccggacggcggacgggacaaaccgccccagaggagagggagagagggcggaccagaacagggggggagcccccgagggcggcagcaaggagagacgaggcacgggaccacggcagaggacgggggccaaggagcccaggagcacagaccaaccccaaacccaacccggagacaaagcaagaagagggcacgggaagagagagcaggcagaagacggggcagggaagagagagcaggcagaagacagggcagggaagagagagcaggcagaagacggggcacgggaagagagagcagaacagaaaagcaggaagccgaaagccccacaggacaggaaagcccagcggcaccgagaccggcggggggaagaaaaacaaagcaaacacccccaaaacaaaaggggaacccgaaagagaccggccccggccgccgcacgcccggcccagacaggaaccacacaccggccgaccgaaccgggagcccccaccagagggacaaaaaacaaaacggggccaaaaaaacccaaggcaaagacaaaagaaaagacacgagcgacgagggagccaccggggcgggaacagaacccgcgccagcggcccccgcccagcagcccgcgcccagagcccgcgcccagcagcagcccgcgccagcggccccacgcccagcagcccgcgcccagccaaagaaaaaacaaaacaggagcgccagacacaccagaagagggcaggacaacaagggcggagccaccaggcgggaacgaaccaggacccggaagagcagcaggccaacacgagccaccccagccccaaaccaaaaaagaacaacaggcaagccgaccggggggaggcagggagcagggccccaaaaaagcaggggaagagaccccggagagcagaagagggggagagcacccacagggcaccgggaacgaaccggcccgggagagggaaggcaaccgggacgcgccaacccaacaccaggacgagacaaagaggagaggaaccaacacggaagaccgccccgcaggagaggggaagcccgggccccccagcacaccggcccggccggcgccgggcaagccaggaccccaaccaaaaaccccaccccccgccccccaccccgcaggccgcagcgggccccgccagacagcaagcgcaagccagagacccgggccgcccccggcccagccgggcgaccacccaccaaagacaggcagcaggccgccgccgccgacccccaggagccggacggcaccaaccccaacggcgaaacaaaggcaccgagcacggcccaaaaggaagcgaaccacaaggcacgccagccccacagggggcgggcaccacccccaacggagcccggccccaccccaagcccggacagcagagaggacaagcagagcccgggagacaccgccccccacgagccccgccagccggccgaggacaaagcacagaggccggaccccacaagccgaccgcccagccggcggcggcggcggcggcggcggcggcggcgcggcggcggcggcggcggcggcggcggcgccggcggcggcggcggcggcggcggcgccggcggcggcggcgcggcggcggcggcggcgcggcggcggcggcggcgccggcggcggcggcggcggcggcggcggcgcggcggcggcggcggcggcggcggcggcgcggcggcggcggcggcggcggcgggcgggcggcggcgggcgggcggcgggcggcggcggccccaccagcaagcgaaggacccccggccagccaccgcgcaggggggaacaggcggcaggccgcaggggacagaaaacacaaccacaacacaagaccagccgaaaaaaggaggccagagcgaacaacgacgcccgaacaaggcaaggaaacccaggaaaaaccccacacaggggcggggaaaggccagaggaagagcacgcgcagcgaacccaacaggggacagccggcgccggcccgagggcaccaggcagcacaggggcaggacaacagcaggcaaaaaccaacacaacggcaagaaaaaaaccacaacacgggcaggcagggaaaaaaaaaaaagaaaaccagagcaagcccaaacaggacgccaaagaacaaggcgccccagggaaagacccccccccccccccccccccccccccccccccccccccgacagggccacagagccggcggcgaacgcaagaggcagacgacaaacccagaaaacaccccgcccgaggcaggaaaagaggcgcaccggccagggcagcagggagcgcacaaaacacagaccaagaagcaagcggggaggaaaagggaaagcacacccacagcgcacaccaaaggaaccacacagggcagaaaccggaggcaggagcgagcagaggccaggagggggcgcacagagccccggcgccagcgcccaggaacccaggaccgcagccagggaggccccacccacaaggaccccccacccggcacaagagaaaagccacagggacaagggaggccccgggcaaggacacacaaaaccagccagcagcccagcacaacccaaaacaaaggcggcagagaggcgggggaacacgggcacggggcagaggggagggccccccacccggggccaaagaggacacggcaccaaacgaagcaagcacccccccgaggagcacggagcccacccccaccggccagacagggccggagcccggcgccggaaccaccgagaccaggcggcccgaaccagaaacgccgcccgcccccgagcgggaaaaggcggcgccaccacgccggcgcgaaggacgggaaagagcaaaaaaagaaaaagaaggagaacgagcgaagaggggagccacaggggcgggaagaacgaggacccgccaccaccaggccaagaccccccccccccccccccccaccccgcaccgacgaaccagagacaggagaaagcccagcacgcccaggcggccgcccccaccaggacaagaaacgaagcaagccagaaagcccaaagagaccggcagggccccaccccacaggcaacaccacggccaaaaagaagggaaagcacaacccaaaagcaggagagcgaggggggggggggggggggcgggcgcggcgggcgacgggcagcacgcaggggacagacacaacaaagcaaaggagagggggacaggccggacggggggaggccagggcaaccgagacacaggagcgcgccgcagagaagggccgaggccggagccccaagaggagacaggcggccaggagcccagaggcgccgacaggcccagcacgggagaaaagaacaccagagccggggaaagggccggggagcgagcaggaccagcccgaggcagggacaccaaggaacccgacgccagccaaaaggaaagcagaaccccaagacagacccagacccacccagcccccgaggcaggccccccgagggaggaagggcgcgacaagagacccccagccgagcaaacagagacaaaaaagagcagaccgcggccaggaaaaaaccaaaggccgcgaaaggaaaaaaacggcgggaaacaacaccaggcgcagacaccacagggggcgcagaagaacccgggaggagagacgcaccagacaaaacaagcgacagcacaaacaaccgggaaagcggacagaaaaaggccagagagaaagggaacgcaacccgcaccgcgagagaagcaggcgggacaaaaacaaagaaaaaagaaaaaaaaaaagccgggcgcggggggagagcaggggaggaacaggaaacgagccgggaacgaacgggcgcagggacacaggcaacacgagccacccagccccaagacagagccaagagcaaacgcaggagaggacaggcaccagagccccagaaccaagccaagaccgggggcgagggggggggggggaccagcaggaagaacgaggaccaaggaaacccaggcccaaaaaccaaagaccccacccaagcagggaagaaggcccagccaggcagaaccaggcaaacaagaaggagacacaggccgcaagccggacaccgaaaggcccggcccggggagccccgggaagcgggagcggcgccccaggggccacggggcagaaaacacacggcaggaagggccgaaaagccagagcaccagacgacgcccaggaacccacccccgcccagaccaaagaggcagaaagcgagagcagcgcaacggcccgggacgcggagcccgggggaaccaggacagaaccgagccaccccagcgcggaaccgacaagagcaaaaaaaccccgaagcaaggaccgaaccgcccaaagcaaggaaaggaggagacacggaaagagcacgccgaaggcggcagcacgggcaggcaggccgcgggcaccacaacagccacccagggagggcaaggagccaccaaacgggaaaagacacaaacaacaagagcagacaggaacacaaaagagggaacccccccggagaagggaacaaagaaagaaaaccgccaccccccccagccaggaacagagagggcaagacgggcacgaccggccaagcaaggaagggagcgagaggggccacgacaagacgccaggccgggcagacaccccaacaaaaaaaaacgaaggcaggaaaccgggcggcccgccaggggcaggggcccaggagaccagcgcggagacagacacgacgcagagaggcaaagcaaagacaacgacacagacagcgagggacccccaaggaggcacaggagacagaaagcaaccccagacaaaacccagcgagcggacgaggcccacggaccaggcgcaaaccacacacgggaccgggcggccaaaaaaacaaacgacaaaaaaaccacccgggcgggagcaggccaagccagcccagaagaccaaggagagaacccggagccgggagggagacccggcccgagcccccccacaaaaaacaggaccaaggagaggggcgcagagagagagagagagagagagaggcaccagggcgagggccagaggcaaaacaagacaacgcaagaaagagaacacgagcggccgagccggggaacccaccagaaagccggcgaaaaagcagagagcacaaagggggggaaggacggggggccaggccccgcaagaggaagaagcaccgccacagaaaccaccccccgagggggacccacaaagccaggcggccggaacaggcggcggccgaagagggacccgccggcgcagagcgggacaacagcacacagccacacgcggccagaggggcacaagagacggcggaagccagcagcgagccggacagcgggcacaagaagccagaggcccagcgccccaccggcgagaaggggcccacgaagccagagcagcaagcccaggacccgccgacccacaggcggaaagggcagcacacagccggaggcaggggcgggaacgaaccgggccacagccacccccccaaaaagaaaaaaagaagcacacgagcaccagacacaccagaggagggcacgaccaacggggggagccaccaggggcgggagaacaggacaccacccccccccccccccccccccccccccccccccccccccccgccgaaacagggccggaacagcggcaccagaacccgagaccaggcgaccgaaccacagagacccaccgccgccccgaggcagggaaaaggcagcgccaccacagccagcacaccccgaagaagaggcggcgagagccagaggacacaaaacacaaaaccaaacgggccccgaaaggccaggcgaggaaggcaagaagaaaggcacgacaaaagcaaaccacacaaaacaaacaaaagcaccccccagggaaaaccacggaacagccacagcgacaaaaaagggcgcacacacccggaggagcacacccaggaagcaccagggcccgaggggggaccccgcagacgcccccggcccgcggcggcccaggacgggaaagccgaggaagaagggggccagcggggggccacacaacgaccagcacgggggcagaagcagacagaccgagcgaggcaagccggcagaggagccaggagccccaagcggggcccaggagaagcacacccggcccggagcaccggcgaggagcagcggagcacggcgaacccacgcaagccgcacggacaggaacagccaccgggaaggaccggggccagccggagccgggagaggggacaggaagagcaggagggaggcccgggggcagggccagaggcagggcgggccggaagggagggcaagggagccaggcaaggaggaaacagggaacacggaccaagagaccagaggggaggggagaacccaaccagcaggaagacgcggcaccacaagcgcaacaaagaggccacaagagggcacagacccccaggacggagacagcagggggccaccagggggcgggaagaaacgagacagccaggccaacaggaaccacccccccccagccccccacgaaggacagccgcccccagaaacacccggaggagagcccccccaacgccgacaccaccaccaaccgggcagaggcggaacgaccccaaggaggagcgacgggaaggagcacccaggcacgaaagggcggaggaagaagcagacggcggccgccaagagcccgggaggcagccgcagagggcgagaggagggaagagagcaaagcaccggaggacaaggggggcaaccccccccaccggcaccagagcccgccgagcagccccgaggccggggaacagaggcgcagagcgggccggcagcccacaaccgcgcaaagaccaacaaagacacaaggagaaaggcagaaaaaggagaccaccagggagcacacggggaggggaacaggggacccagcacagggccgacgaggcagaagagagggagcgcaaggggcggcaaaggggcgcaacaccagcaagcccagccgccacaagggacaaggggacaaaacggacaccccagcagacagccccccgcaggcacgggccagccccgccccagcaggaccagagacacaacagcggggaagccaaaggagggacagcccccccagcccgaagaacgagagacaggagaccgaacccgaccaccccaggccccaagacggaaaggacgcaccacagagagcagcggggaccaaaacagggccagcaccgggcagggccaaccacgagccgccagcccacaaggcccggggaagacgccaggagggcaagacagccccgacccaggcgccaccccagacaagggcgcccacacagaaaaccggccagaaaacagaacgggaggcagcggcagcggcaaagacacaccacaagacacgccaaaggagagaggaacccgggacccagggaggagaggacccacacaagaccggcgaacacacaacggacagcagcacaaacacacacacacacacacacacacacacacacacacacacacacacacacacaccacgcaacaccagcgcacgagcacacacacaaaccaaaaaggaacagaaggggggcaggggcagaccggcagaggggcgaccacgcacaacgagcaagcaccccagcgcgcacaggcgagacagggccgaagcccggcgccggaacacgagaccaggcgcccgaaccagaaaccgccgcccgcccccaaggcgggaaaaggcgggccaccagcccggcaaaaagagaaacacagagggaaacgacgccagacacaccagaaggggccagacccaccagaggggagcaccagcaggcgggaagaaccaggacccggaagagcaaccaggcccaaccgcgagccgccccagccgcgcacacacagggagaggcggaccggcccaggaagacccccccccccccccaccccccccccccccccccccccccccccccgggagacagggccggagcggcaccggaacaccgagaccaggcggccagaaccagagagacgccgccgccccaagagcgggaaccaccacaccggcaagacgaccaaaggaaacagggaccaaaagggcacagacagccccacaacaggagacgggaagcagagggacacaggagccagcggaaggaacaacagcgggaccgaggagaggcacacgcgcgcaccggccaggaaagacacaacaaaccggaaccgcggcaaaagcagcacaccaggagccagagagccagagagagaaaaagaacaagaacaagaacaagaaagcaagagagagaaaaagaacaagaacaagaaagcaagagaaagaaggcaaaaccccgcccaaggagaaaccccgccaggacgaaccccaaccaccccggcaaagcagcacacaggagcaagaagcaagagccagagcaagagagcaaaagggagaaggcgaaaccccgccccaaggagaaacccgccaggacgaaccccgaggcgcagcccacggcccaggcacacgagaaaggcagaacacaggcgggaaaacgccccgcacgggcagaagaccacagaacacagcgcagcgccacaaaggcaaaggagggcggccccaacagaggaaaagccagccgacgccggccccggagaggggagagggcagcccccggcccaaggaccaagaagggagaggccagggccagagggcgcgcccccagagcgcgggcagcccagcacccagcaggaggccacaacccagaaccagcccaggaaaacgagcccccggacccggcacaccgacaacacaggacacaacagaacacaaaacaaaaaaaaaaacaaacaaaaggccacacacaggggaggagaaacagcggcggcccccccccaccaccacaccaacccacacaaccaccacaccaccaccacacacaaccacacacacacaccaccaccaccacacaccaccacaccaccacacaacaccaccaccacacaaccaccaccacaccaccacaccaccaccccaccaaccaccaccacaccccccccaccacaccacaccaccaccaccgacacaccaccaccacacaccaccaccaccccaccacaccacaccaccaccacaccaacccccccacaccaccacaccaccacaccaccaccaacaacaaccacccccagcaagcaggcgacaggcaggaccagagacgcggggcagagagaagcacccaaacgaagccagaaacaagcccgacccaagaacacgggccaggagcaggccggaaggccggggggaaaaagaacagacgcccaacaacccgcacagaaaacaacagcgaagcccgacggccccgccagcgcaaggaggcagaacgccagaccgccagaagagggaaggcacacgggggcgcgagcgggc

SEQ ID NO: 653 - RNA, 302 nt, Mus musculus
gggagagcagcggagaaccgcccaagagcaaccacaccccagcccggcacacgcaaagagggaaaacgcacagaaagaacacacaaaaaaaaaaaaaaaagggcggaagaggggcaggcagaccagaggaagccagccggacagaggagcagggcagccagggcccacagagaaaccaggaaaaacggaaaaaaaagcaaggagggggaagacaccgggcaagcagaggacaacgaagagcagcccccccaccagggccgagcacagggcagcaagcaccggggagcccaccagcccagacc

SEQ ID NO: 654 - RNA, 4719 nt, Mus musculus
gcacagccagccgggcaacaccaaggcacagaggagggcaagagggccgcagaagggaggcgacacaaggaaaacacaggcacaaaaacacagaaaccggaaagagacccacagcaagacaagggggggagaaagggaacccaaggggaacagaggccacaagcggcaaagccaggccaaaagaagcgagccaagacaaagcgaggaaaaagaaaacgagcagacaccaggaaaacgaccgaggaccaaaccaaaagagcaagggcggggacacaggggagacaaagaggcagcaggccaacaggaaaggaagaagaacagggggaagaagacggccacgcaaaaggagagaaggagcggcccaggaggccacgagaagaaaagcagaaagggaacgaccagacaggacgccaagccagggagcccgagagaggaaggggccagggagcaccacgggcaaaccagagacgaagaaaaagccgccaaaacaagcggagggagcagagcaaggcaccacccccacaaaccgggagcagcgcaagaaaaagaaaaccgaaccaaagagcaaaccagggcaggagagaggccagggaagagcacggccccccaggggacagcgacgacacagggaaggggccacagcaccgcaaaccagcccacaccgacaagcaggcaacaggcacacacaaaaaaacacaaaacacaggcaaaacaccacaacaaagaaaaaaaaacaaacaaaccccccaccccaaagagagcaggcagacaacaaagagcacagaccccgggaacccacacaaagaaaccaaacaagagaaaaacgccagaaaaagcaaccaaaagaccagcccgagcaaaacacacgcaggaagaagggaaaagacaacgcccaggaaaggaacacaaagagaagcccacacgggaacagaagaaaacaaggagccacacccaacagcaaggaccaagaaaccccgaaaaagaagcccagaggggggcgcaccggaccccagcaccgaaggcgaaggcaggcagaaacgaagaggccagcggcacagagccaggacagccaaggaacacagaaccggggggaggggggggaaggagccgggagaaaccaagcaccccggccaaggagccaaacacagaccagaccagaccaggggcacccaccggggacagcagacggaaaggcaaggacacaagagaaagagaaaaggaacagccaagcggaacccagacgcaaaacaccaacccaccccagcggcacgccccggaaccgcagaaacaagcccgagacaggacgccgagccgcccggaagagaagaagcgagccccaacaccaaggagaaggagaaaacgcaagagggagaagacgagcgacaaaaaagcggaaggacccagggggaacacagaaacaaagcgaggaagcaaacccgccccgcccccccaaaccagaggagaacagcacgacaagaaaaacagcagaaaccacgaacccaaacgcacaagaagaggggccggcggaggaaggccgcgccaagaaagaagaacacccccccccacgccgggccaccacagccgaacccagcacagggaagacagaagaaacacccgagcaaaagcaaagaggccagcgggaaagaggcccccaagaaacaaacaaaaccacaagacacacaaaaaccaagcagagagaaacaacccagagagcaacacacccccaaagacacacaaaagaacaaaagccaagcgaaacaaacaccaagccccaaaacccagcacaagcaaaacacacacagccggaaaggaaaacagaaaaacgaacagaaagcaaaggcagaggagcaaggaaagaacacaagcaaacaaaaaagcaaaaccgccaacagaaaaaacaaccacaacgacacaacagcgaacaaacaaaaaacgcacaccagaaaggccaaaaaaaccaaaaggcgacaggaaacacacaaaaaaggagaacagaaaaaaaaaggaaaaaggcaaggaaaaaaaagaaaaaaaagcagcaaaaggaaacagagaaagcacgaggcaggagaagaggcaggaaaggcccgcccaagacagaacaaggagccgggaccaaagaggggaggagaaacgacccgcaaacacacacacacacacacacacacacacacacacacacacacacacaaagagcaacaaaaaacaaggaaaagagaaccaacacagagaaaaggggccgaaaccagaagggaacacccaagaaaagaagcaacacacaggcaccagaaaagggacgggaggcagaccacgcacccaagggaggcagaaggcaacaggaggcccccagggcagggaccaaccaggcacaggcgaagcaagcacgccacagccaccaaccaaccggaacccgcagaaagaacaacgccccaggagaccaccagcagccacgccgcaaaccccaagaaaacccccaaagacacacaaacgagagcggaccaaagaaccaaaagacccgagacagagcagagagggagaacacaccagagaacacagaacaacaacaggccaggggcccacagagacgaagcaacacagacagagggggcgagaggccccgcagagaggacagcgggcgcaggacccaacgggcacggaggcacccgaccgccgacgggaccacccacggcacccacccagccgaagacaaggccagcaaagagcaggggaacccggaaggccgcgcgcgcgcgcgcgcgcgcgcgcgcgcgcgcgcgcgcgcaaggaaggaggagggggaggggagaggagagagaagggagaaacgggagggagaggaggggaaacgcacgggagaacagaaagaaaagaagggcggagagaggccagggaagagcacgacgccccgaaggccgagcaaaccaacaaccacgggggccacaaccacccaagagacgaccccccggaggcaaaggcagcacaggacagaaaaaaaagaagaagaagaagaagaagaagaaaaagaagaagacaaggaagcccaccggacgaaggcaacgaaccaaccagagccagacagagcggagcaacaaccaaaaccaccaaaacgaaaaaggaagggaagcagaggccaaacacagcgaggaagcaaccgcccaccaggagcgaacacaaccccccccaccccaagaccacccagccccggcccagcaaagcagccccacacgcaacccaggcaagcagccacccagcacaaagaaacaccggaaacagccagaccagcagaaaacaaccacaaaaacaaacgaacgaaacaccaggcagacaaacccgaaggacaaaaacagcaagcacaaaaacccaagcccaacaacaggcccccaagagcaaaacgaagcaaaaagccaaaaaagagaaaccaagcaaggccggcaaaaaaagaagcggaccaggaaagcaaaaaagcccagcaaaagaagccagagaccaagccccacaaaaacagaaacaaaagaaaggaggcaaacgcaagacaggcccaagagaccaccaacaacaaagacacaggacagaaccgccacccccagagcgacagccccaaaaggcaacacccagaacccacaaaggcccacagaacagcagcgccagcacgccgcagaagccacgcaaagggagagccacacacagccagcgacaaagcaagcaaaaacacgaaacacacacgacagcgacacagaacccagaccaccaccaacccccaccacaagcccaaaaagggaggcaaaagaagggaaacagaagggagagaaagcacaacaaggacaaaggcccaaacagggaccacaaaagacagcacagccgacagagaaaaccaaaacagacaagcagccgaacgagccggaagcccgagaaggccagacggacaaacaggagccagaccagccaaaaaagaggcgaacaaaaaaaagaaaaaaggaccaaaaaaaaaacagagaaagcggaagaagacaggccgcggaaaagaacacagagaacccccaaaggccaagaagggggagcaaaagccaaaaaagaaaagcggggcagggagggcaggggaaagacaccgccacggagcagccccaaaccccacgaaggggaaggaaagaacgaccccacaaggaccaggccccaagcagccggcaccgaaacacacacacccacacacaccaccacaccacacccccccccccccccccccccccccccccccccccccgccccccccccccccccccccccccccccccccccccccacaacaaaagaaaaaaaacaaaaagaaacagcaaaccacaaccaaacaagaggaaagacacccagaagggaaaaacccagagcagggcagagccacccggacccaaacccacccagcccagccaccaaccgagcaaccacgacaccaaacgaccccagcccaaaaacacacaagaacagacaaagcccaccagccaacgcccccacgccgccccagacccacccaacgccgccaacaccgccggccaaacccaacacccccaaacccaggcccgaggaggcgaaggacaaagagaaaagcacaggagaagcccacgcccagacccagagaggcccacacgagcgcaagccccgagggaccaacgccgaagccacaagggaggggagcacagacaccacccaagggaggcgcgaggaccgaga

SEQ ID NO: 655 - RNA, 1998 nt, Mus musculus
ccccaacggggcagggccccgacccagagccagggacacaccagccaggcagcgcccgagggccagagcccagaaccaccaacaggccacacacggcagacaaacgcaccaccgagcggcccgcagcccgcaggagaccgaacgaaaggacagacccgaaacacggcaccaacaacacgggcggaaaggccaggaaggcagcagacccggaacggagacagacagagagccaccacagggcccaggacaaacaggcagaaagagcagccaagccaaccacgaggacccagccccagcaaaggggaagggggggggggggccacagggaacagacccagagagcccagcgaccagaaccacaacagaccagacaacccaaaccacagagacaacgccagcccgccccaaggcaggaaacagggcaccacgcgcccaacaggaggaaacaccccacagcacgggaccgcccaacacgagcggcccggggaacacacacgagccagcccggaggggccaacggcaagacgcaccacaagccgacaggccacccagagccaaaagacccaaacacaggaggagccaaggaaacaaaggaacaagaagaggacaagcccaaccaccaaaacaggcaccacaagaagacacgccagcgggcacacggaggggaagcagcacaagcaaagcccccagacagacagcaagcgagaccagcccaggcgaagagccaccaaaaagaaacaaaagaaaacaaaagggcggggaaggacacacaacccagcacgggaggcaggcgaccgagagcaaagccagccggcagaaggagccaggaagccagggcacacagagaccacaaaggaaaaaaaaaacaaaagcacacacaggaagaggacaagacaagggggccccccaaggggccagagaaggcaggcccccacgagccaccaccgcccgggcaaccaacacaggcccaagagcagcaagagaacagcagagaaaggcccagccggaacgggacaagaaacgacacaaaaacaggacccaaacacaggaaggacaggaaaagcccccaaaaggcaacacaggaagaaacaagaggcagcgccagcaacaagacaagagaagcaagaaaagaaacaagcgggcaggggagacgccaacccagcagggaggcagagacaggcggaccgaggaggccagccggcacagagaaggccaggaagccagggccacagagaaacccgccaaaggaaaacaaacaaacaaacaagaaaaacaagacaagaaacacaagcgagcacaagccgaacaaaacaccaggggcgaggcaagacaacccaagccaccaagcagccgggcacaaccgagaccaccaaaccccaaacagccaaaaacgaccaacagaaagaaaaagaggacaaaagaacagcaacggggaacaagcaaaccagggaacacagacagcccccagagcgccaaagaaccaaacccccaaaacaagaacaaggggccagcggcgaacgagaacgaacccagggccggaaaagcagacacaagcaaaacagggacaggagagcagagagagaacggccaccaacaggaacaacggacccaaagaaaaagcccccaaaaaccacgcggaggaagagaaaggcgaagccgggcagccagaagagcggcagaaccaagagagaccacacaacgacaacgaccagacaccaaaggacagaagaacgaagaggagggcaggaccacacgacccagcgagagcagcccccccaaaacccaaacgcaggcagaccccaaagagacacagggacaccagccccgagccccccacgccaccaaaaagacccgccaccaacagccaaggggcagggacaacggcagagccggcgcgggggacagaggccaggcgacccaaagcaccggaacagaacaccacaagcagccacacaaaaacaacccaaaaaaacgcccaaccaagaaacaaaccaccgc

SEQ ID NO: 656 - RNA, 1672 nt, Mus musculus
gagggaaacgagagaagacggaaaagaagaacagaaacaagaccacgaggaggagaccacaacaaagagaaccaaaccggaaaaaagagccaaggacacgcgccacgggaaagaggcggcagaaccagggaggagccagagaagagacggaaaagggcccgagcagaaggaaccgaaggcgaagaacgcaccagcaccacacaccaacaggcagcagagccaaggaagccccaaaacagaaaaacccagcacccgaaaagagcaccgaaaccagccaaagcagccagcaggaaaggacaggccgggggcacacgcaggaaacaaggacggacaacacaacgagcaaaaaggcgggagggggagcaaacgggggcaacaggagggagcgaagggccccaaggccagaagagaacaccccgcaaacgccaaccggacaagccagccgcgagccaccccagcccgaccgggaagaaaggacccacaaccagcgcccacagcaagccaaagccacgacccacccaaaaacgcaagaacaggccagccagaggaaaaaggacgaaccaggaaagaagggccacagcgccagagcagccacaagagaaagcagacggcacacggaacgcaagaagcagcagcaaagacacaaggaaagaaaacacacaaaggagcacacgggcgcagggcccgaacacacccacacagcgccggagcagggcgccggcaagggcacacccagcaccccgggcgcaccgagcacaccggcagaaaaacagggcaaagaagcccgaaaagggccgcagaaccccaagggaggaaggagacaacccgcacaccaaagagaaaccaacaggaagcaacccaggcaaagccaagcaggagagggggcgagcaggaagccccacccccggacggccccccagaccgcaacgacagaagaaaaccccaccagaccgaccaacggccagaaggaagccaaaccaacaaggaacaaaaaaccaacacccaacaacagaagcagccaaagcacgagaaggaacaggcgccggaaaaaaaaagaaaggaacaggaacagaaacaacaacaaagagagaagcccacacgccaacaagaggggaccgcagagggagaaaggaagagaggaagaagagagaagccagcacaaggcgcgggccgagcccccagaggaagcgggcaaaagaagcaaaacacagcaagccgagacaacaagcgagaacagaaccgaagcgcaggaccagggaggcaaaaaggaaaaagagagggcacaaccccacacccagcaccacagcccagcaccaccacgagcacgaccgagggggcaaccgaaaaaagcagacgcccagcacccgaacccaagcaccccaccgacaaaagagacaaagggcaaccgacacagaacacaaccgaaacgacacacacggacacgccagcgcaaaaaaaaccccccccccaggaaagaagaggacaagcaggaccaaagaagaaagaaggagagaaagaaacccaagagagaagcacaaaaaccaagcgaaaaacggaagaaaaaaacggggaggaaggcaaacgaaacagcaagacgcggccgggcacgaagcaccccccagacagaaaggaaacaaagccgagcccagcaggccacaccccgcaacaacgg

SEQ ID NO: 657 - RNA, 1706 nt, Mus musculus
gcccgggccagcaaaaacacaaagagacccaaaagagcaagcgcagagaaaaaaaaagaaaaacaaacaaaggagagccgcgagggccagaaaaaagcgccgaggaagagacaaaaggaagacaagccgcccagggcccgaaggcaaaagcagacagccaccaaacgagcaggcaagggcccgacaacaacaacaaaagaaaggaaaaaaaaaaaaaacagagaaaagaggcaagcacccacaggcacaagacggcagcaaacagaggaacaaggaacagagaccaggagagcggcgaagaaccggaaacaccgaagacagaaccacgcgcgcagacgaagccacccccgaacaacggacgccccccgggccagccccgaaagcggcccccgggaagcagggggcgcggcccaagggccacagggcaaagggagaagaggaaagggggaggggggggaaggagaggacgccgccaggcccaaggcagggagacagcacgagcacaaccacgcagagcgacgggacaggaggagggacgaggcaaggcaacagaacggagggcaacgaacgaagcagcaccacacacggcaaaaacagacaaggacacagagaggaaaaacaacggaaaacggaacccccacaaacaagcaaggaccagacggaccgcccgcaccccacaccgcccgagacaacggcaaagccagaaaagccacagggagagagcgagggaggcagcgcccagcgagagaacgaggagcccaacaaaaggagaaggaggcgagccgcagcgggcagcgccacccaccgaacgggacagagccaaaaaaaccggaaacgacaggacacaaaaacggaccggcaagagaccaaacacgaagagagaacagcaaagcgccgggaggagagaagagacgaaaagagagaaagcaagcaggaaggcagggacggcaggagagggccacccaccgcgggggcaggcaccggcgccggcagaaagaagggcaaacaaacagaagcaaggaccagacagacagaaggcaggggaagcacaggagcagggaagaccagagcccgagaagggggggagcagaaaacagaggacaagagagagggagggcccaggcccccgaggggcggggggaaaggagggagagccagggggggcccgaggggaagggccccagcaacagggcccccggccaggccgcagggaggggccagggcacccaggaggccagaggccagaggccaccacccgggagcgacagcaaccaggaaagagcgacaaaggcagagagcaagccagccccggcacgaaggggaagaggggaggcgcgaagcgcaggagacaaccggcccaggagcccaagagccccaggggcccagagccccaccacccgagcacaacggcaggcccaggcggcagcagaccacgaaggacacagggggaggaacacggaaggccagccaggagccccgcagccgggagaccgcccacagccggcagcaccagggagcagggagagcgggcagcccacgaccacacgccacagcccagaggggccaccacagccgagggcaggaggcaggaccaggcagagcccccacgagccaaaggcaggagaccggccaggggggcaagcagggggcaggagcagcgacaacgaggaggcaaccgagcacacccacacaaacagggggcacgg

SEQ ID NO: 658 - RNA, 14579 nt, Mus musculus
caacaccccgcgaggaggcggggccggggccagccaggagcccccacgagacaccggccccgcgccaggggacagcaagagcagggcgcacgcacgcaccacacccccccggaccaccaccgaccccagccaagccagaaccagagcgcaggcaggggaccccggaaaggggagaaaacgacccaccgcgcaggggcggcgcaccaaaccccaagcaaaacaccggacccggccagcggggaaaaagcacagcaggccgacccaaccagagcacagagcgagggaacacaaccaaccccgcccgggcgggccggggacaggccccggagcggcgccagggccacggcggaggacaggcaagcgacaggaaccgaaaacccgcaaccgaaagcccggacacaggcccggagcaaggcggcagaggcccccgccccgcgccgaaggacaccccccaagaaaagcgcggagccaggcaagggggggcacaccccacccagacagaggcgaggcaggaagccggagagggcaccgacacagaagaggcaggaggccagggcacacaggaaaccacgggaaacccccggccaggaaaaaaaaaggcgggcaagacacagaacaaaagaaacaggcacaccgacccagcgcgcaccccccaggagacagaaagccccaagccgccgacaagagcaaggaggggggaggagggagacagcagggacaaaggcaacagccccccaagaaagaagcccaacaggcgccagaaacaaccagcccagcaggcaggccaaggagcacgacagaaacaacagcaaacacaaaaaaaaaaaaacgcaggcacgaaagagacaaaggaagagggccaacgagacagaacaacagaaggggcaggaagaaaacacagaaaccaccacacccaggacgggcaggagccaggagaggaacgcagcaaaggagacggaaaaaggggccgaagacaaagaaagacaaacaaaggcaacagcggagcaacgaagcacggggacgagagggaacacgaggcagaagccggaaagagacaggggaaaagcggggaaagagacaacggcaaacaaagcgaagacagcaggccacaggccaagcagaaagggcgccacaggcaaagacgggggaggcccagccaggaggagacaaggccagacacaagcgaacagggcccgaccaaggcagcacgggacgggaggggggggggggagggacagcgaacccgagaggaaggaagaacaccaacgggaagaccaaaaacaacggacggaccggacgaggggaggcgaaacccaacagaggagacagccggggccgagcagaacaacggaggggcagagagagcagcgcagagggggaccgccgccggcgaacaacccggaggaagaagagaacaggggggggggggggggggcagagaagaaggggagaggccacagagggagaacaggcacaagggaccaccccgaggccagagggcagagaagaggaaagcagagggaagggcacgaagggcgcaggaaagggggggggaaggaaaaaacgaacgggaacgagaaggggcagaaaccccaccccaaaaccccagaaaagaacacacgacaggaaaaaagccacgccagagggcagacaccacgcagaccgaccccagcacgagacccgacagacgccccaggccacggacgcaccacccccacccccccgcccccgcccccaccccaccccccaaaaccccacccccaccccccacgcccaacacaagccagccagaccagaaaaggggagaaggcacagaagcaccagaagaagaagaagaagaagaagaagaagaagagacgagaaagcacagagaaccccgaaccagaggaaaaagaaaagacaaaacacgaccccagaggccaacaacccacccgcaccccccccaagaccaggaacggggccggccagacaaagaaaaaagaagacacgaggccagaacaccagaagagggcaccagaccaacgggggggagccaccaggggcgggagaaccagacccggaagagcagcggggcccacccacgagccaccaccagccccggccagacgaagggaaagcagacaaccagcggcaggcacaagcgaaaagagagaccgcccaaaggaagacaagacacccagggagacgcgcagaggcccaaagcagcaaggacaggcccccagggagacccaaacccagagaaaaaggacacagccaccaacgagggcaacaaaagaagccccagcaggagaaccagaccaagaaaaggggcagaggccccgccacccccccgaaaaccccacacaccaagccaggcaccacgccccagacaacgcacccccgcaggagaggagggagaacgcccacaaacacggcccccaacaagacaagcagcaagggaagaacaagagcacaggaccgaggggagaggcacacgcaaccaaggagaaacccagaaagaaaagcgacaaacagacccgggcaaagaggcaggcagacaaggagacggcacggggagaacaaaaagagcgcacagagcgaaggaccaacggggaagccccacgggcgaggccagcaagcaagggaaacagcaaccgaggcaccggcgagccgcacaaccaacccaacaggcacagcaaccaaccagggccccacacacaggcgaaggggaccgcaaacaaggaaaacgacccagaacccagaaagccgcacaaacacaccggaacacacaggaacaaggaccagggcaagaacagcgaaccagggaaggcacaaaagacaacgaacccgaacgacaggagaaagcccaaccacagaggcaaacggacagcaagaagaaaaaaacacgggaagggaaagcagcaggaaaagagagaccaaaacgcaacaaagagaaaaccacacacaacaggcagaaccaagccccccccacacaccccacaggagaagccagcaccaagagagaggcccgaggccgccaccgggacccagaaccgacagcacacagggcaggaaacagaacggagaccagcgccggaacacgagcaggcggccaaagagacaccgcccgcacccaacgcagggaaaagggggccaccacgccgccaacagcacacaggacacaccacgaaaaaaccgccacaaccgggccacagcaagagaccaagaaccggaaccaccggcagggcagaccaccagaacaggggaagacggaccccaaggacaagaacccggagacgagcaaggacacccaccaggcgaaggacgagaagaagaggcgaaacccaaagccaagacaaaagaaaccaaagcgaggagaacccccgcgccagcagacaaggaggggcaaaaacacaccggcccgaccagagaagggacagcaaaaggccaagcagaacagagcacagcagcagccaaggccggaaacccacaggaaaaaaagaaaaaaaaaaacaagagaaaacgagaaggaaagaaacacggggaaaagaagaggccagccagcacccgaggaggagaagccgagaagagccccaagccgagggaagcagcaggcaggaggggagggggggacggagagacgccccgccaaagggcaagaggacacaccaggcgagggggcaggaagcagagagagggagcgagggaacccaggacggagacaggcagcacaagacaggagcccccaaaaggccaaggagagccggggagacagggccgggcacccaacgagaaggcgccgggcccaggcagcaagaccagcaaagggaaagggagccggcggcggcgagggaaaggggaggggcaagagcaccccgaccccgggaggaagcaggcacaggagggcccaaggacaggggaagagggggacggaaggacccccaagaacacaggaaagccacggaaggaggggagaagacagcaagcagcgcgccagacagagggggcagccacaggagccgacaaagcagccagcacacaagaaggagagggccagccaagaaccacaaaaacccaggagcaacagaacaccccccgacgccagaaaagacccacgggcccagccaaacaccaccacccaaagaaccacgcaccaggggcagcccgcgggcgagccccagaaaccaaaacaaaaaaggggcggggggagcacacccccaccagacgggaggcagaggcagagaccggagcaaggccagccgaagagaggaggcaggacaccagggacagggcaacacagagaaaccgcgaaaaccaagaaaaaaaaaaaaaaaaaaaaaaggagaggaaggagaggaaagaggagagggcaaggcagcacagcaacacagaccagggggcacaagaggcagaccagaacaaggcacaagaacccaagcagccaaaggcacagggagacccgcgaaaagaaagacacagagacagagacagagacagagacagagacagagacagagacagagacagagacaaaaaagacacgcgccaaggcgacaccaacaacacgaaaccacaggcaaaggaagagcgaccccccaaacgccccgacagacagacagacagacagacagaccccacaacccgaaggcaggcacagaagggaaaaacaggagagggaaagcacccaagacagccaagcacacccccagcccagcacaggccaagcacacaggaaaaaggacccaggagacggcgcgcgggcacccagaggggaaagaaaacgggcacacgaggcacacagacaaaaggaccaggggcaagcgcagcaaaagaggagccagaacccaagccggcagcaacacggcaccaagggaagacacaccgaagagggagccgagcacccagggggagcgccacccagcgagagaggcaaagaggacaaagggcccgcgcaaaaccgaagcagcagagcacagcagggcacgggcgaggcccagagaaagggcagaggcagagaaagggaaacaaggcaggccggcacaggcagggccaagcggggcgagacaggaccagcagcacacgcccaaaccacagagcaagacaaccccaaaccgacgcggcgggggggggggggggggggggagcggacaaggccccagcagaaacccagcccaggcggacagaaaccgacacaaaaaaaaaaggccaacagggccaggcaggggggcacacaccaacccagcacgggaagcagaggcaggcagacgagcgaggccagccggcacagaggagccaggacagccagggcacacagagaaacccgccaaaaaaccaaaaagaaaacccaagacaaaaagaaccaaccaacaaacaacagagagacgccaggaaaccagagaaagaaaggaaaggaaggaagaggccagcgagagcacacgccagcccagcacagagagacacgggaccgagcaaggcagccggcacagagcaagccaggacagccagggcacacagagaaaaaacaaaaaacaaaaaaaaaagcaaaggaacggcggagaaccccagaccaaagcaaggagaggcaagggaccacaacaccaggggcgaggcaggaagacaccacaagcgaggccagcaggcgccaagcccaccagccagagcaccagcaggcccgaaagcggccgaaggaaggggaccggggggggacaagagccccggcaacaggacaggaagagcacaacggccaggccgaggacgcgggcaccagcagcacgacccacaccacagaaccccacccacggagagagcggccacaacgagcggagcgaggagggaacagcccagcaggagaacaaagcggcgacagggggaggaccacacccacaccggcagagccgggagagaagcgccccaggggagcaagggcgaaacggaaagggagacaagagccacagagcaaaggccgaggagagcacaaggcccaccccagcagagcagaacgcgaaggcgacggcagaccgaccgggcgacaagccgcagaacccggagcacgccggggacacgacggggcccagcccagacggaaccaaacaaaccccccccaggacacgcagaaacagacaggagcaggaaaagaacgaaagccaaggagccgaccccgacaccagaggaccacggcagcaaggaagggcccgagaccggagaaaagaccccaagaaggagacaagggccccacaaaaggcagcggccccacaggcacccccagaaaggagaaccagccggaaagcgagcacaccaaccgagcccaagccccccaggaaaaacaagaaacggcaagacacaagaagaccaagggcacacgggaggggggggggagacaaggccggagcccggcgccggaaccacgagaccaggcggccgaaccagaaacgccgccgcccccaaggcgggaaaaagcagcaccacacgcccagccaccaagacaaaaaagagacacgagacacagacacaccagaagagggcacaaacccaacagaggcgagagccacccgaggcgggacgaaccaggaccgaaagagcagcaggccgaacgcgaaccaccgaaccccaaaacagagcccgcagagaggcaccagccagcagaccccagaggccggcagagagcagggaccccggaacgggaaaacagaggagagcacaaggacaagacccaacccaagagcccagaagcagacccaggccaaccacgagccacccccagccgagagacaaacccaaaagcccaggcggcgcaccacaccacgaaggcccccagggcaagaacaagccaagccaaggccagcaagggaacagcggcacgagcaggaggccaggaagagggggccgacagaaagggcacgggagacaggggaggccaagaagaagaagaagaagaagaagaagaagaagaagaagaagagcagggggggggggggggggggagccaagcggccagggacagaccccccggcgccgcgggagagccccgacgcccagaccgagagaacccagcggagagcggcgccggacagccccccaggagagggcaaaagaaagaaaaaagaaaaccagaagaagaagcagcacccagaaaaaaaggaagaaaacaagcagcaaaaagaaacaggaagcacaaaaaggaagagaagaggcgagagcagccgcggcccaggccgggaaaaagaccagccacacacacacacaaaaacacgacacacacagcaacaaacaaaacgaaacacagcaacaaacaacaaacacaacacacagcacaaacagacacaacagcagcacacacgacaggcacaaacagcacaacacagacacaacacacagccacacacaacaaacacaacacacagcacacacacaacaggcacaaacagcacaacacagacacaacacacacaacacacagcacacacacacaaacacaaacacacagcacaacacagacacaacacaaacagcacacacaccccccaagaagaggaggagccaaaaacaaaaaagaacggacagggaccacacccagccagcaccagggagcaggcacggcacaaggagacccagacagccagggcagcagcagagccgagaggagaacccacccacaaaacaaaacacaaaacaagacaaaaccaaagcaaaacaaaacaaaaaaaaaaaaaaaaacaacccgaggcacaaaagggccaacaaacagacaaaaagaacaacacaaagcacccaaaagcccaacccccccccacccgcccccacccacccaccccaccggcccggcaaccccgacggggcaaaaaggcaaccaaggggcccccccaagaggccgacaggccaccgcagagcagcagagacacgagccgggggacggagcaaggccaccaagggcagacccggcgacaagaaaaaaccgagcaggcaaggcccaaggccaggaggccagagcgagcgccggcagcccccggcagaggggaccgaagcacacgccacaagggaccacaggacacccaagaaggcagcacagagaaggaacgaacaaaagaagagcagagacacaggcggagaagacccagagcacgaggggcgccacgacaacaaccaggcagagcacagcaaaaggagccgaccagcggcacaggccagaagcagcacggggaggcgggggcaggaagacaaaccaggaggaaaacagcaagaccccgacaccaaaacaacaacacaacaaaacaaaaaaaaaaaacacaacaacagcacaggaccagaagaaaaaagacagggcacgaaaaaaggcagcgccccgaacacaggggcgagacagggccgaagccggcgccggaaccaccgagaccaggcggcccgaaccagaaaccgccgcccgccccaaggcgggaaaagggggccaccagccggcccgaacacacaagaaaagaagaagacagagcgccagacaccagaagagggggcagacgacggaggggagccaccaggggcgggagaaccggacccagaagagcagcggggccaacccacgagccaccaccagccccgaacacacaacccagaggaggggggcgagacagggccccccaccgacaccgggcccgggaccagcggccaaccacagacacccgccccagggcggaaaagaggaccacgcccaggagaggggaaaaggagccaggccgggcgaaaaacaaaaagaacaaaccggagaaagcaggaaacaagggaggaaagaacggaacaaaagagaaagcggaaccaagccacagggccccaagaccccacccggaaaacgacagagagggcaagaggaaagaagaagaacaggaagagcagggcaagccacaacaacaccacaaacacccggggcaggcaaaaccagaggcgcagcagacaaagcgaccgagccaaaccccaacccaggaggaggaaaggcgagacgagccagcaggaggaaccggaacccagggcaagcacagggcccaaacacaggacaggaaccccgcccagccgacaggaggggaaccgcaggaaagccaccagcccacgaaaagccaagccaaagaacgccaccaacaccccacacccaacagacacgaagccgcaaacgaaccgaagggcaagagggcaggacccagcccaccaccgcccaccacggccaagccccgcccccacagcaagcagacagggccaccaagcaagaaacaacaagagcacacaggcccagcaccggggaccgagggacagacaaaaaaaaaaaaacaaaaccagacgcagcggacgcaaaccggagccagagcccccggcccacgagccccacgccagagccccagccagagccccacggccggaccccgaagagggcacaggggccgaagagacagcgacagaccaaggagaaaagggagcccggcacacgagagggaccggggcccccccacgggcccccaccgcccccgggcagaaaccaaggaaacaggcccaagcacagcgggcccaccaaacaggaccgagacagggcagcccagcaacgacagcggcaggcccaacagcagcagagaccagaaaagcccggaggcacccgcaggaggcaccgagccaccacccaggccggggacaagcaagccaagaggcgccgacaggcaggcagccaggaggggcgcgggaggccgcgggcgcacaggcggcagggggggccacggccagggaccgggcagcaacagggcgcgcgggcggcacaagggcaagagagagcggaggcaggggaggggagagaggagcgggggggacacgagggaggaaccgcccaggcaaagcagcagacaagcaaaggaaaggcagcaaaagccaggccgggagcgccaaaaacacagcgaggggggcaaaggccacggagagcgccacgcgccccagaggccaggccagcccagcacccgcaggggccacaacccgcagccccagccaggggacaagccacacacaggcaaagcaccccgcacagaaaaaaaagacacgagcgcaagacaccccagaagagggaaccaacccaacagaggcggggcgggagaaccaggacccagaagagcagcaggccaaccacgagccaccccagcccaaaggagacgccgagcccaagcagccagcaggagcccaaacaaacaaaacaaaacaaaaaccacgagcgaggagcccgaaccgaaccccgcagacacccgccggacccaggaccacgaagcaggaagacgggaacgcacacccccgacccaagcgcccacggcaggacaaaggcgcgaggacacgaacgggcacacggccccgggcccaccaaaggcacgacagagacacccagaaaaccgcgcagggggacagacagaggcaggaggaaagagaacgggggacacgcagagcagcagccaaaagcagcacggaagggccccaccgcccccagcccgccgaacacccacagcagccggaggcacagaaggcccggccgcgccacccaggaaaacgagacagccgggccggccgagccaacgcccccacccgaccagcaacacccgcgggcgggggacgcacaccaacccagcaccgggaggcagaggcaggcggacgagcaaggccagccggcacaaaggagccaggacagcagggcacacagagaaacccgccggaaacaaaacaaaacacaaaacaaaacaaaacaaaacccacacaccgcaaggcacaacacaaacacacccgaagcaggaccccaacccggagaggcagggccacgagccagccgagcggaacgcagagaccaggaggcccgaacggacagaccaaacacccgaccccaagaggagacaggcgacccacacaaccacacaaccacaccccccccccccccacccaaggcgaagcgaccggaccaagacggaccccaaggagcgagcccagcacaccagccaacaccggccgcagacacgaagaagggcacaaggcccaaaccaaccagaaggggggcggaccaagaaggaaggacaacacgaggacagggcacaagcaaacgccacaccgcccccaggcggccgaaccacagcaggcaaagcacccgaccgccccccccccccaaacgggaccacaagaagcccacagcccagcacggggggggaggggggggggggcgggggagggggagaaggagggaaacccaggacggaaccgcccgcggccaaagcaccgaaccaagacaacagccacagggaagacagagaagagaacgaacagcggacagcggagaaaggggaaaaagggggacgggcagggagcgcacgccgacaagcacaggaagagaggcaggaggaccggagcgaggccagccggcacagagaagccagacagacagacaaagcacaaggagacccgcaggaaaaaaagagagagacagaacaaaccacagcagcaggcaaggcaagagcacagcaaggaaggccccgggaacaaacacagggaaacaccagagagcccaaaacagagcgccagggcaggcacccgagcagcccaaagggacacccaggaaaggaggaggagagagagagagagaggcgcaccccgaacagaggaaggaacccaggcccggaagagcagcaaggacacaaggggagccagcccagcccccaggggcaaggaaggaagcagacaaaacgagcgaaacaaaaggaggggcacgaagggaaagccggaaccgaagggcagccccagaggccaccaacacccaccacgcggcggagcaggaggggggggggggacaggaaagaggagagcagagacaggccacggagcaaaggcggcagaaccaggagccccgggcagcccccggaacgggaacagggggcacaccaaaccaagcccgggcggacgaccgcaacagagacgccaacacgcccgccccaaggcgggaaaaggggcacaccaccacacccccccccccccccccccccccccccccccccccccccccccccccccccccccccccccccaaggaaaggaaaaaggaagagaaagacacacacacaaggcacagggggcacaagaaagacaggaggaaagcccagaacacccaagagaccgagggaccaacggaaggaggaaggagaagggaaaggaggcagaacaagcaacccagccaagggcccgccaagccagcgccgcgagcgcgcaaggggcgacaacaggagaagaggaagccccggggagagcgggaccggcacaggcccagcccccagcagagacccccaggggaaaccagccggggacagcccagcagccgaaccaggaggcacaggcgagaagcacacccaaggaggacagaccgagaaggcacagaagagaccagagccagagggaggcacacacacacacacacacacacacacacacacacacacggcaccacacgggaaggggaggaaggacacagaggaaggcagacaccgagggcggaagagagccaggcaggagacgcgcaaagaaacaaaaaacaacaaaacaaaacaaaacaaaacaaaacaaaacaaaacaaaaccccacaaggacgggaggagaaggaagcacccagagaagccgggcacaacccacaagccagaacagagaggcaggcgaggagaagcccggaaagaaacacacacacacacacacacacacacacacacacacaccaagccccaagagaaggaagcaacaggagacccagaaggcggggaggaggggaccgccaaggggcagaaccccagcccggggccccccagacccaccaagccgccccacagcacagaacccaccaggacacaaagagcgagcagcacacgacgcaagcaccacccaaaggagaggggcaggagccagaagagaagaaccaaaaaagcaccaaacggggcagccggagggaccggccaccgagcaccaggcccagccacacagagcacagaagaaaaaagacacgggaccaggacagagacccaggagacgggcaaagagggcaagaaacccaggagcaccagcagacacagcagagccagagccccgcaggacccagccacaagacacacccacagaacacgggggacagcagagagagcaagcacacgaccacagcaggccagaaccagagagaggagcaaccccccccgagaggcccaagccaccgaagacaagaagggagaaaaggagagccccggagaggaaggcccgcacaggcccggaaacccccagggcaaggagcagaagaggcacaggacagaggaaccaccccccgggacagagaagaacagggcagaggggcaagcccaccacgagccaccacaaccagaccggcggcaaaaaggaggccggagcgcagaaggcagcagaagagcacggagcccagaggaccagaaccagaggccaaacgccgaaccagccaagggaccaaaacacccacccagcccggggccacagagaccgacagaacaacaccgacaaaaaaagaaaaagagacaaaaaacacaaaaaaagcaagccgggcgggggcgacaccaacccagcaccgggaggcagaagcaggcagacgagcgaggccagcgacacaaaggagccaggacagccagggcaacagagaaacccgcccaaaaacaaaaacaaaaaaaagccaccagggggggcgcagccacccagcacgggaagcagacgcagggaacgaggaggccaaccagcacggaggagccaggacagccaggacacacagagaaacccgccgaagacaagacaaaacaaaaccaaacacggaaaccgaacgccaaagccacagagagggcacacaccgggaccagcccgagccacggcacaagcaacacagcaaaggggaaaaagagcaggacagcacagacggaacacgcgcagggaggagggcagagaaaacagagcaaaaagcgccagagaaagcaacaacacaagaaaaagccaaaacgacacaggcaaagagaacagcacggaggggcaagaaagccaggacgccagggccggaacagagcaaacaaggcagccaggacaagaccaacacagagacggcccccccgaagggacagagcagggcacacaagccaaaggcccccaccagacacccaccaagccccaaccacacccaagagcaagcacacccacccagcccaacaagaccggccaggcagaagaaccaagggaccagccgccccagccagaagaacgaggcccaaggccgagccccgagccgaccacccccccaccaccgcgcacccacggagggaaacaaggagagagaccaggaagccaacccagcagaagagaccacagggggaggcagaagacgccaccagcagggccaaaaggagaacaccaaacacccgaagaagcacaacaccggccccgcccagacaaacaggaggcggagggccagacagaggcagagccaggaccgagaagaagagcaaaggaaggcacgccagcagaagggggaccaacaaaggacccaggcaccaagggggaaagggagcacggca

SEQ ID NO: 659 - RNA, 9408 nt, Mus musculus
caacaacacacaacacagacacgaaaaacacgaccaccgaccggcagagcccacaagacggagccccccccggacagaagaaaccaccgacacaaaagaacccccccagacggaacaccaccgaagcacagaccagccccggagggagaagccagcaggacacgggaaagaacggggcggcacagacaagcaggagacagaggaagagagggaggacagaccaagacccgagagcgggcgggcagaggcagagccaagaaacggagaagggaagggaagcacgggggagccgcgcggcagcagaagcagggcaggcaggaagaagcgacccgcccacccacccaggaggggaaaccgagaccagagagagaaggccccagagaacagcggcaaggagacagaccagggcaagcagccacacggccccaccgacagggaaggggacgagcagagggaccagacccaggaaaaacaggaaggacaacagagagcaccgagaccggcaccacagagaccaaaacaccgaggcaacaccgccccccaggacaggacaccacaccggaaaaagaagggacgaaacccgccccagacgaagcccagcacagcaagaacacaacagaacaacacaccgaaggagggagcaggccgggagcgacccgaaaagccgcgccggagagcacacgggggagagaccgccagcacagcgggcccggcccgggcaagcaacccgggccagcccaagaaagaccggagggacggaaggaagaaagacacaaagaggacagcaccaccccggaccaggcaggacgaacagggagaaaaggaagcgagaagcgcgccggggaagagaagggacagccacccgcccacaacaccccacccaggaacgcagcggagcagagcccaaaaagccggcacccaagggccgagcggaagccggagcaagaacaagaagccccacccgcagcacagagccggccaaaaaacggaagccaaagcacgccgcaacgaaccgggaccaaccacgaaggaagaaagaccagaaggcagagaggcacggacaaaacacagaggccaccagcacagacagaccagagcgaccccagaggcaggcccagggggcggagacacggaggcagccggggcacccgagggcagcgggaggaaaggagcgcaagaggcaaaaagacaggcaggcaacacgccacgcaaagagccaagacaaggcccccgggacggaaggagagcccacgacgaggaaggagaaacgcggagagcccagggaaagggaggcccaggagacaggcaagaaccacacaccgcccccgaaaagacaaggccacgagacaccgcagccagaagagggcacagaccaaggagggggagccaccagggcgggaagaaccaggacccaggaagagcagccaggccaacagagcaccccagccccgcgccaccaggcaaacagaacacaagagggagaaggagaaggaaaacagacgcaggcgcagccaagaccaaaagcgaggaaaagaaacacagagaggaaacagccgaaaaaaaaacccacacccaagaaacaagccaaacaccccaacagcaggaagcccaaccaaacagcagggcgagaacacagggaccagccaaagaacaaaggagagcaaacaacagcaggccaggaggccagaagagggcacagaccccccgaaacggagagagacaagcccccccaggggcggggaacgaagcccaggcccgcaagagcagcaaggccaacgcgagccacccagacacagagacccaacaccccccccagccacccccaacccgccagcagggagagccagagcccaagacaacccgcagggcaacccaaggaagggaaggaagcgggcgccggaacgagaaggaaaagaaacgagcaacacgcgaaccgggaaagccagcagcggggagacccaagcccacagccccccagggacaccccaacacgacaccacaggacgggaccaacaaagcccagaaccccaaaggccagagcggggaccagacccaacacaggcccgggagagcccaggccagcaggacccagcggcggggagggaacccccccgcgcggggggccaacgcccacaccaggggggggagaggagcccaaccccaggcagccagaaagacccggagaacagaacgacaacccgcccccccgcagggccccccacaacaaccaggcccaccccccagaacggcccgcgccaggcagcgaaaagacgcgcaaccagagcgaacggggacgaaaagagccgcccacaagacagggaccccaaagaaacacaccaagaagaacaggacgcgagcagagccaagaaggcacagaccagacaggggggccgggacgcccaaggggcaagggcgcgcgaaagccgaggacagagcggcgagccccggaacacccccagagcaggcagagcacccgcagggacagaaggcaagaagaacgcggaagggggggagaaaacagggacaccgggaccaggggagaaccggcaggcaggagccccaggacgaccagggaaccccagacgaccgacagacacccaaaggaggcgaaggggacaagcagcccagggcgacggggaaccggccagcgggagccagcggaaggagaagggaagcagagggaagaaccgaggcagccagaagaaaaggcgggagaaggagagccagccgacacagcccagacccccaaccccagacacaggcagaacagggaaggaccaagcaacagcggagaacggagcagcagggcggggaacgaggaagaccaaggggccccacagcaaggggaaaagcgagcagaagccagcagaagaaccaagcaggagaacggcggagcaaggaagccacacgaaaaaagagggggaaaacgggccccagaccggaaaaccgggggcaccagggacacaaaggaaacccaacagccaaaggccaagggagaaccccaggcagacaggaaacccccagggaccagcagcagggccaccgcggggccacagagaacaaacaaacacacagcaacccacacccaagaggaaccgcccccaggggaaaaaagaaagaggggacccaggagcccggggcgggggccagggagcggaggaggcaggagagagcggacgagcaaagaaggaagccagaggaaagagggagaagcagagcgggggcagagcgagggagcaaggccaggggggagcagggcagagaggaccgggaagacagcggcaagggggaaaaggcagggcgcgaagggagaacggagagaaaagacgaagacgagcaagagagcgcggccaaggagggacacaccaacagacaacaagaaaaaaaaaaaaaagaaaaccaccacccccaagaggccaagggcagagagaaacacagaggcagggccggaagagccggggcagccccccgcacggggcggcagcggcccagcaggccgcaaggggcccggacccaggcacccagcaggagcgaacgccacgccagcagacgaaaacgagaggagagaccagccgggccgacccagggccaagaggagagggcgcgaccaggggggggcccaagaggacaaacagagcgaccacaaagaggcgcaggaaggggacaggcgcagcccccaacgacacagcgaaccaaaaagacgagagacaagaaggagaaacagaggagacacacacaggacgccaccaggagcgagcccaggcgcccagggaaaacccccaaaaggcaccgccagaaggggcacaagaaagaaaaacagcacgggcagaagggggcgcgagagaagccccaaaaccaggaaaaaaacacaaaaaaaaacggggaaacagggccggggcaggcaaccaagcaagcgcccagaccacagacacacacacacaccaccacaagaacaaccgggaaccgccgagaaaagaggacaacaagccgcgccacaggcacgccccgccagcagcacagcacagagacccgcgaagccagcagccacagacacccagaccaacagcaggcaaaaagacaagggagaaccagacgggcaccgaaggcccagaaaagagcaagccaacgcccaacagcccggccaccaaagagaagggaaccaacgggacacagcaccccggggcccgaccagacccacggaacaacccagccagaggcggggagaaccggagcagcccaagccgcgcaaaccccccagcccccgggggacgggccagggcccacacaggccagagccaggcggagaagccgaaggacacacccgggaccgcccccggcaacccgggaagaaaacccaaaacagcaccgacccggcgggagaacaaaaagaacccaagggaaaccagggggccagaaggaagggagaacggacaaggaagaagggaaaagccggcaagagagcgcggaggacccccagggacaggccggccccagggggaaaagcacaagcgacgggagccagaaagcacaacagagagaccgaaggccaagggcggaaaagaacaacagccagagcggcgaaacaagccagggaaagagcgacggaggcgaaagcgagaccgacggaggcggggacagcaccaagaaaaggacaaaaagggaaacagggaaaggccaagcggcggagacgaaagcgcgacaccgaggacaggaacaaggaagagccgcaccaagaagagagagacgaaggcagaaacaagcaaacccagccggaagcagggggcaagaacagagacgggcgccagagagccgaggcggggccccagggaggacaggcgagaccaggcacacaccaggcaggcacgcacggccccccggccagagcagagcaagccagcccccccagggaggagagggaccaggccggcccaaagccccccgcgacgcacccccaccgcacgcggccaagaagagcgggggagaaccaggccaagggaaagcagcaccacgaaggggagggcccaagacggccaaggcagacaggagaagaaaaaaacaccaagagggggaaggcaggagccagcagcagccagccaaggggacacacaacacagggaggaagggcggggagagagacggacaccccaaggggcgcacccccaagaagaaagcaaaacaacgcacagagcaggaaggggagagagcgacccaggagggaccggacccccagcggaagaggggagggacaaggcagagaggccaggccgggggggggaacgcacagaaggccacgaaacgggagacaggcggcgaggaagggcggaggggagggggcaggggccgaaccagccggcccccagggagagaggggagggggaaggggacgagcggagagggaggcgggagacccaagagccacaaaaaaaggcagggaggagggagagccagcacgacgagacgacccaagaagagagagccagaacggaggccccaggagaaggacaggaaagaaaggggggggagagcgaaggaggacacaggaagccaaaggacagaccaaggccgagacagggccaaagcccggcgccggaaccacgagaccaggcggcccgaaccagaaacgccgcccgccaccgaggcgggaaaaggcggcaccaccacgcccggaccaagggcacgcggggccaggagaaccagagcaggggggacaaagccacccacgagcacgggccccgagacagaagaaagggggggggagggaggaggaggaggagaagaaagcaagaaagacaaagcgagaacagaaagcacaagacaagcggcaaaaggcagaggggcacccgggggcccgaacaaaacccaaaacaaaccaagcaccaaaaacacagcaccgacaacgagcaaaaagaacgaaggacacaggccggccaaggcagaccagcccaacaaccggcagcacaacaaccaccgaccagacgggggaagagaggggaaggcagaccggggagccagggccaccaccgaagccagagaaagccccccgcgcgcgccggacggccagcagaacgagcgcaacaggacccgcacacgagggagagcgagcagaggcgaagagaccccgagcccagaacgggcgcaaaggccaggagaggcggccacacccggaggagcacacgcccagcagcccacgaggcacccccgacccacagagcccaacaacccagcagccacacgaggaacccaaagcccaacagcccgggccaggcaggcgcaaaaaacacgcaagacacaggggcaaacagcaggggccagcagagcaggccaccgcaacggcacagggcccacacccccgaagcaagacggagggggaggggagagagggcccaaggggaggcagagaaggcgagagcagcaggaaggagccaggggcacgggggggggggggggggggggggggaggggggggggggcagcagggcggagagcaagcgcagaaggaggccggcaggcaccagccccccagcggcacggaagggcgggacaccgccggggggagcaggcaaccaggcaagccaccggcaccagagagggaaacagacagggagcagggaaggaccggggcggggggcgaacggccaaggccccggacacccaaggccccagccacccaagggggcggcccagcacacgcagcagaggagaagaccaaggccccaggaagaaggaagcccacccgggaacagccagaagaccagaccaggaaccgcgggggcggagaggcccaaagacggcaccgggaaacgaggcagaccggcaggagggagagaggaaccgagacagagagaacagagaaagagaagagaggagagagagagaggcgcgagagagaagagacagacacagacacagagagagacagagagagcgcgagcccggcacaacccccccacagaaccccccagccacgggacaggccaaaagagacggaggcagaagccgccgaagaccaccaggcaccaaacaggaccagagggaaaagccagccgccgacacggcaccccccgcccaggacgccacgggcccgacccggcccgcccgggaccggaacccacgagagcagcaccaaaaacagccagcgccaacggcgacgggggcccaccaagccccaccgagcgaggcgaccgaacaggaccaccccgaagcgggagacagggggaaccaacacacccaccaaccccacaacgccgagacaaccccgccccccggggagagaaacccagaagaacaggacaggccagggggacccaggccaggacagacaaacaaagcccgcaaaaggaagcacacgcgccggcacggcacacacaggcacccgagcccgaagccccacgggccacagcaggcccagaaccggcagagaaaggaacgggagcgggaggacacaggcccgcccaaccacgcaggccagggagaagcccgggaaagacaaaaagaacaggaacacaaggcagggcaggggggccacccccgaggcgcgaacggcaccacgacccagcaccacaccgcaggaaaagccgggggacaggacaacacagcccccagaacagaccaaagagacaaagaggagggagccacccagaggcacgcagcggggcgccgccgccaccccccccccaggcagggaggagaaggggggggggccgaccagaggccaaggagagccagagcaggcaggcccggcaaaggcaggccccccaggcggagccggggccgccagcacaaacgcacagacaccaagaacacagccgcgcgggcagaaagaaagcggggggggggggcaaagagggagaccggcccgagagagggcggagggagccacaccagcaaccgacagcagggggccccgcccacacccacaagggccccggcgcacagcagccccaacgcaagcccccccccccccccccccccccccccccccccccccccccccccgcggagaacggggggacagggaggaacccaggccgcccgcaagacggccgggggagcccgggggcacggcgagcgggaaggacgggccccacgggggggcacccaggcagcccaccaccggcccccaagccccaaacacaaaaaaaccaccccaacacgcgcggcaaaacaagcacagagcacacacagaagaccggacggaaggcacacccccacagagaaggcagacaaacaaagccccagaccccggagaagaacggagggaaaaggcagcccgggcagaccccggcaagaccagaagcccagacagagggagaaagccaccagaagaaaacaaaaaaggacacagacacggaggcccccccgcccagacgacccacccaaccccaccccccccaaccgggggggggggggaggcggggcagcacggcggggcccgacggggccaaggcacacaacggaaacaccagaggccaccgcaggagggggacccagcagggcaaaccaccaccccaccaggcaggcgggcccgggaggcagggagagcagggggcacgggggccagcggggaagcccaggcccccacaggggcagcacgcccacccccagccggcgggggggcagcgccaaggccgccgaggaaagcgcagcgcccaccagggccgacacacgagccagcaacaagcagcccaaagccagcaacaagaggggccaaggagcagcaacaggaggaggaagcaagagcacagggaccacgcacagaggcagggggcgcaccgcccagacaccggcagaggccaggggaccagggacaccagacaacagaggacccaggacgggaagggacacacgggacagaccagaagggggccccagaacggcgcccccccacaggggagcgcgaggccgaggggggggaacaagcaggaccggccaacccagaacggcgcagacccagccaaacaccaaaaccaacgcagagaaacaaaacagaccagcggcagacaaaagaaaacaacagagacaggcgcacaggaggcggccgaaccgcacccgcccaggccgaaggaagacagaaccacccacacaacaaagaaaaaaaaaaaagggaaagccagaagcgaagagaaaagaaacccccagcaccggcaccccagaaggaccagacccgaaacaaagccagcacaacgacccgaacacccagggggaaaaacgcggcgagcgggacccgcccagccgggaaacaggacgcccacacggcgaagcaaaagcgaccaacccagcgggaagcccgaaagaccaggggacaaacgaacacacagaggaagggggggagcaacaccagagccagggaagaggaagagacacggaagagcacagcagaacaagcaggaagccgccagaggcccaggc

SEQ ID NO: 660 - RNA, 8817 nt, Mus musculus
cccacacaaacacaggccccagaggacgagcacgcgcacaagcccgggggccggccaccgggccaaaacgccccgccagggaaacacagccccggccccagcccccaggacagaaacaccaagaacggcaagcagcaaaggccaaaacaagaccagaagaaaagcaaaggaagggcgcgccagggcaagagaccaccgaagcagaccccggaggcagaagagggcaggggccccccccaagcggacacaggaggcaggaacacccaagagggagcgggaacaaaccagggggaagagccagcagcaagcggcaggcccagccacacaggcacaggcggaaaacagggaacgcgggcgggggcaagcgccaccccagacaggaggcagaggaggcagaccggagcaagaccagcagggcacaaggaaaccaggcaggggggggggggggggggggaggcggggggggggggacggggggaaagaacagcagaacagcccaccgcccaggcagcacccccggacacacaccaacacccaggaagcccccccgacccaagcccacaggccaaagggcaccagagggcaccccagccagcggaagagcaggaggagaaagggagaagggaggcccacccacaggagagaggccgaaccaggaagggaggcggggccggcagaggcccagaggcagcccgcccgcccccgcacagacagcgagccccccccccccggggaggggccggccacgcccggcgcccccagaaggggaggccggccccacccaggccaaagccccccccccccagggaagagaaggaagcaccgcacaggggcgggagcaccccgcggcgggggcacagcgccagaacacgccccgccccagcccgggggaggggggagacaccgaaaaggccaagaaccccacggaggaaggacggcccgccaccaggacaaggggccaggcccggccccagcacacacgacacaacacgccggcagccaagcagggcacgggagaccaagagggacacaggaggcgccgcccagaacgacagcgggaccaggggaaacagccgaaggagaccaccgcccggccggcggcgggagaaccggggaagggacaggcaagcggacaggccggaaagcaccggaaagcccagacggcagcacagagaaggacggcgggcagggaaggcgcacagagggcggcacggcaaaggcccgaggcgcagagacgcgagcgaccaggagcagggcagcaaggcagcagaccccggcggacagcccccgcagagggagaaaggaaacacccaggcaccagccgcggcagccccaggcccacccgacgacccagcggccggcgaggcgcggaccgagcacaggcaggggggagaggaaggagggacccagaggggcaggcagaggccaggggacacgcgcaggaagaccagggaaccgggcgcccccggagagcacacccggcccagccccaacgggaaggagagaacaggggagagaagccgaagggagcggaaaagccaggaaccagaaggccaccacggcaggccgaagccgcgggcccaagcagggccgcccggagcagcggggaccgagcccagcccagggcggcccacacgcccagagggacaggcagccaaaagagggggccgaccaaagccaaagacacaaaggaccaggggcccaagaggggccacggggagccagggagcacgagcccagggccagacaagggaacccaccagggccacaggccccaacaagggacaaagggacgagagggcaaaggccacaggccggcaggacaggggacaccacagacgaccgggcgagcagcgggagcaaggaaccagggaagaggggggggggggggaggcgagcccacaaggaaaaccgccagccgagaaccacagaacaaaccacaagcgccacaacacagcaggggcgggggggggacagagagagcccaggaagccggaacccagagaccccgacgagacacaggcacaagcacacaccgcacgcgaaaaagcaaaaaggagaaggagaaccaggaagaggacaggccgcagaggaccgagcggcccagcacccacagaggccacaaccaccagaacccagccggggacccaccaaggacccaaggacacaggcggacacagacaggcacgcaggaaaacgcccaggcacaggaaagaaaagaaacaaaaaacaaaacaagcagagacagggccggagcccggcgccggaaccccaagaccaggcggcccgaaccacagagaccaccgccgcccccaagaaaagcaggccaccaccaccggagaagaaaacaaaaaaaggcaaaagaggacacacaagaccccccacgcagcgccacagaaacaagcccaggcgcggagccaaagcccaaggaacaccagacaaccccggccaggggaaccggccgccccaccagcgcccagggcaccaccaggcccaggcccgccaggggcgaacagcgcacgccggccccgagcccagcacacaaggaaacaggaggcagggaggggccacagagaccaagaacccccagcaaacaccaggagacaagccaggacagagagagagagccaggcgggagagggccaggggaccgacccaacgcaccgcacagggaccaggcgcgaggaagggacagccggcaaccagaaccacaggccggcccggccagcgcagaaagcaggcaaaaagcaaaggccccaggccggccccccaggccagcgggggacgggcacagccccaggcagggacagagccccccggagggccaagcaggccaaacggcgagcggcaagacgccgcccacgggggaggaaggggagggcccaggacagcgccagcagacagcccggggcggcccagcaaggagacggcaacgcaccgcggagagcgggccgaggcagaggcaggcaaagagcaccagaacaggggggcgcggggagggcccggcgccggaccagggcaccacaggccccgcagaagacaggcagacaccaggaggggggggaagggcaggggggggggggggggggggggggggacaccaggcaaaggcacagacgagggagggcacaggggcagaggcgcggggcggcggagaaacggggggaaggggaaggagaggcggagccgggggaaacgggggagggggacaacagggcccgcccgggggcacaggcagcgcccgcacacaaagcggacaggcagccagggaacaccaacagcaccacaccagaaaggcccgggaaggggaggggccaacaccaggagcacagggacagagcgacacggggcccaacagcagggggcgggcaagggggggccggcgggcgggggggacccgacgcacagaagcccacaagggccaaccggggcagggaggcgaccggggcgagacagggccggagcccggcgccggaaccacgagaccaggcggcccgaaccagaaacgccgcccgcccccgaggcgggaaaaggcaggccaccacgccagccggaggcgaccaaagaaaacagaagacacgagcgccagacacccagaagagggagcagaccgagggaggggagccaccaggggcgggagaacccgacccggaagagcagcggggccacccacgagccaccaccagcccgaggcgaccaacagcaggaaacagcaaacacagcccacacacacacagcacacacacacacacacacacccaccacacaagcacagcacaacgcacacaccacgcacgacacagcaccacagcaccaccacaccacacaccacacacacacacagcacacagcacaccacacaccacgcaccacacacaacacaccacagcacccaccagccaccccacgccacacaacacacaggagcacaaacacaacacaggcaccagcacacagcaacagcaacacacaccacacacgacagcaccacaacgaccacacacgaacccgcccacgccgcaccacacacaaagagccagccaacgacgggccagggcgcagcccagaggagaggagagaagccccgacaggagccacacgagccgggcccgggggaccccagcaggagcaggaagcggggaaggcgccaaaaggcaaaggagagggaacgagaacaacaggggccccgccaggaggaggccagccgacaaagagacgaagcagaggcaacgggcagggagccaaggaccagggagaggccagccaagacaggcaagcgcaaggcccggggagcccagggagcaagaagaaacaaggccagccagaagagaagcaaaagggggcggagagcggacacagaacgagggcgaggggcaggagggggggcaggggggaccagggggcccagcaccggagcagagcggcgcgcaccgcagcgggcccagcgcccgcccgccaagagcgaccggcagcccaacgaagccccagcagagccaggcggcggggggccgggccgggcccccggccccgccgagaggggaggaggagggaccaggaaaggacaaacgccaagcccacaggcgcgggcggccccagaggacaagcagccccccgccagagcggaaggagcgcgcgcacaacgccccaagccgccccagagcaggacggcaccacgaaaaccccggccacgcggagcagcgccagcgccggccgaccagccacccgggaaagcccccccagccaggacccaaggagagggccgcccagcccacgcaaaaaaaaagaccaaggaggggggaccaagggccccacggaagccgaggccagagccagggccccaggggagacgggccccccgccagaggcccggaagccgcgcggggacccaggggccacacagacaaacgggcaaagggaaccccagacccccgcggggacaaagagcgacgaagaaagggaacccgggaaggaagccacgcccggcacgccaccaccaccaccaccaccaccaccacaccaccacaccaccacaccacagaccgcccaggcccagggacagcgagacagccaggcccagccacccagagaaacggggcagagagagaaggaaagcggaaaacggcccgggcagggaagcgagcaagaaccagcacccacacaagagaggaaccaggccagcagcaagccaggaggcgccaggggcagaaagaggagagagcggcccccgacccggagagcgaaccgggaaggcgcccaccccgccaggcaccgggcggagcagccgggcccgggaaagcgaggaacagaagaagcacgacacacaaagacccaagaagggggaggcaggggggccaggccccgccaccgccgggagaaggggagggggggaacccaccggccagacagagagcggcccggccccagggcacaggcgcgccaggggcgggcccgcccacagccagaaggacgcccccggccaaacaggccgggcagcggaggcggaagcacggcagcggcggaggcgacaacggcggaggcgagccggcccgcaaaaccccagagacacaaacagaacggcacagaagaaaagaaaaagcaaaggcaaaaaaaaaaaaaaagaaaggaggcaaaagaaaaggcggcagggggaaggggcggagcaaggagaagggagggagagggagagggggccaggaacaacaaacaagggcgcaccgaaggcgccacaagcaacaaacagcaaggcgagacccagggcaggccccccccaggaagccaacgggacacgagcaagagaagacgacgagagagcacggcaaaccagagagaaagagagggccggggggggggggggggggggggggggcaagcacgcacgcccagggagacgagcagggggaagagaagacccccacggccagggagagccccagggggaacggggaagaaaggaggaccgcggaggagggggccgcggaggagggggccgggaggaggggaccgggaggagggggccgcggaggagggggcgcggaggagggggccgcggaggagggggcgcggaggaggggcacgcacgagccccgcccacgggaccagaggagcccagcgcgcccggcccccacaagaacaaaccccggaaacagcaggcgccacagcagccaaaaagaaagaagggaccagggggacaggccgacagggggagggagggaagacgggacgaacggaaacgggaacacgaagcaaagccagggcacaccaggggggcgaaagcaaaggccgagaacaggagacgggagaccacacaaaggacgccccgcccaagaacgccaaggcaaaccagacaggacaacaccacagcagcagcgggccaccacaagcaggggcacgcggaagagacaccgaacgggcaaccggagacagggccagagcaggggccacccacaaaccaccacagcaaagaaaaaacaagacagcgggcgcaggggcacagcgcggcccgggagaggggagcgcccgagacaccggggaagacccggccgcaacagcggggcggcagaagaacagaggggcacgacccccaggccccaacaccgaggacaacagcgcagccccacgggcccacacccgcgcagcgcggaaggccagcaaagcccgggccaggacccaaacagcagagacaccaagcagggggacaacaggagaggacccaccaggcacccccgcaggccgccagaccaggaagcccagcacgagggcggcccaccaagggggaagaaaagcggcgaaaacaagccccacaaggaggagacagaggccccaaacaggggcgagaagaggccagcgcaagcagcccgggccaacccccccgaacccccagaaaaaaacaagcaagaacggagcaggaacccccacagagaacaaaagcagagccaaccgaccccaggcaggccccagaccgcagaaagcagcgcccccaagacaccccccgggccccaagcccaagccggcgaccagccgaaagccagccaccacaggaccgacgcggaaacgcaagccggagagaaaacacgaccaaaggcgcaggaagaaaagcacccccagaaccccagggcaacggagggacacagacacgacgcccaggaggcacgccccggaccagggacaggcagggggcggcgggggggggggggggggggggaggaaccacagccaccagcgccagcggggccacgcggggccgcacagggaggcccagggcccggagccaccccagccgggccacacagggaggaggaagggaggggcagccagggcccggcaaacccccaccaggaggcccccagcccaccggacgggccaccccagcgggcacccagccaccacccccaagccaagagggagaggggagagggcggggccgggcgccacagggcagggggaagaggaggggggggagcaggggcgggaggcaaccaacgagccagccaccacaccccgcccaccccccccgggaccgccgaccgcgccgccgagacaggacaggagccaagcccaaacagaagaggacccccaccgggagaacgggccgacgaggcagggcagccgggacagagccgccacgcagccagcccccaccgggcgcaccggcggaggagcgccaagcccccccgagccccagccccgcagagaagcaaccagggcaaccagacaggccgaggggcccaccccacccaccccaccgaggccagacgcgccgggagggggcgggcgccccggcccacccccgaggacggcgcagggcaacgacacacgaccggcacggagcacggcgagggcagccccccagggagggggaccccagagcgggacagagcaggccgcaggcacccgcggccccacacacaaacacggggcccggagcgccccacccccacaaacccaccccggcaggcacccagccacccgagaccacagcacagcccgcagcccacagaccgggccccacccagcggggcgaggcagcgccaacagggaccgggaccacggacaccccacagaaccccagccccaccgaccccaaaccccagacccagcccccccgcgcccaggagagcagcacacaggggcccagcccagacacagggacaccaaggcccggcccggcccaccaccacccacagggcggacagggaaagaccggccaagcccccgagcggacccaaggaggagaaaccaccagagagccccagggagaccccaaacaagacccaccacaccgccacaccacagaaacagggagcgcacgagccgaccacgccccaggccccagcgaaagaccagacccagcccggagccaggggaacccgagccgacagacagccggggaaccacaccacaaacaagacaagggcacacaccgggccaggagcacccagggccgagagacccagccgggaaccgggccaaaggcaaacacaggaaaaacggaagcgggaagaaggccagagaagcgaggggccagcggcccagcaaaggccaccggcagaagacagagggccggagaagggaagggcggggagggagggacagccagagacccgagcaagccggggagccaagcgaacccaaggacacaagagccaggcacaggggccccgaaaccccagcccacagaaagagagagacagagcaggaggaccccgggaccccaggccagcacaggagaacacacgggaacaagcaagaccgccaaacaggcagaagggaggacagacaccgggcgccgacacacaagcaaccaacaacacacacaga

SEQ ID NO: 661 - RNA, 1123 nt, Mus musculus
ggggggggcgagacagggccgaagcccggcgccggagccacgagaccaggcggcccgaaccagaaaccgccgcccgcccccgaggcgggaaaaggcagcgccaccacgcccggcgggaccagagaccagccggggaggggccagggaccaaagaaaagagcaaagaaaaggaccaccccaaggaggccgcaagacggcccgaaaagcggcccaggagaggcaggaacagggacgagcagccgagaagacaccaggaagcgagcagagccaggccggagagcgagaaggaagaaggaggaaagaaggaagaaggaaagaaggaagaaagaacagccggagaaggggccccaaagacgaggggggcgaggggaagccagcgaaaaaccgcaaccagccagggacgaaagcccagccggagaaacccgccgagaaaaaaggggaaccccgggaagacacaaaggcccgaccgcacacagacaaagcaaaaacagcaacagcgaagaggagaaggagccgccccacccagccgagaaagagaaagaaaagccggaggagggcagcagacaagaacaaaaccaaaccagggaggcccgccgccgggaagaaaacacaaaggcaaaacacgacacccggaggaaagaccccaggaaggagagaccaggggcgggaaggcgccgcccaccaggcggcgcggccgcgagcggaggcgcggggaaagcggagccacaccacgagcaggcaagagcacgacgcgcagagaggcgcaccagcgcaaaacaaacgagcaaaaagcaaacacacaccgcccacggcccccggcaaccagacgggacaaggggacaacagaacgaaaaaaaacccagcgcgccgccaaccccaccggcccagagccgcgcaaaacaaaaaaaaacaaaacaggacgcaagaaccaacggcgagcaagcaaagcaccgacagcacaacggagaggaaaccaccgccgcaggcgagcacacggccacccacaggggggcgcgggggcggccggggccacgaccgcacagggacacacaaggcaagcgagagaacggcaggcaaaacaagagcagggagcaggaggcgcagacaaacccgcaaaaagaac

SEQ ID NO: 662 - RNA, 1050 nt, Mus musculus
aggacagcaacccccaagaagacaaggacaaagaagcacacaaaggggcagggaccaagcagcaaggaggcaacgccaagaaggaaacgccaaggccacaccagaaccacaacgacgagaacgccagggccacaccagaaccacaacgacgagaacgccagggccacaccagcaccacaacgacgagaacggcccgccgcaagccggcaaggagacaaaaaacagagcccggcagagggccggcaggggacggcccaccccgccccagggcggcacaccaaaaaggcgagagccccagccggaacacaagaaagccgcgcccccccccgccgaggcaggcaacgaagcgccacaaggaaccgaagcaggggcgaagagcccaaagcaacacaggcagaggccgacgaaacaggcgaaggaaaggaaaagaggccggggcgccccaaaagaggggacccagaaggccaagcaggaggagggacagacggcagaggcgaggggaagaaagccgagcggcccaaaaaggaacggagagaccccaagggaaaagcgccacagaaacagaagccacgggcggcaagacagagaacggaagaaacaaggaaggcagcccacaggcagaggagcgggagaaccacccaggaccagcccccacagcagcagagggagagcgccccagccaaggcgcacggagacacaaagggacaaaccaggaaccaagagaaaacccagacaaagaaaggaaaccaaaaacacgagaagggggagccagcaaagcgagggcgagaccgggaagggccaacaaccggacccaaagcaagaacgcccgcccgacagccagacccagaaagagacgacgggcccagccgcggagggccaccaaacaagacagcccgcccgaagccccaggacgacacaagccgcggcaggaggagccagcgcaaggagaccaaaggaccaaggccgaaaaaaccaaggccccaaacaacaaagggagcagaggcagaccccaggaaaaaaaaaaggcagaacagcagcacacccagggga

SEQ ID NO: 663 - RNA, 12376 nt, Mus musculus
  misc_feature (4294)..(6188): n is a, c, g, or u
  misc_feature (7735)..(7834): n is a, c, g, or u
  misc_feature (8890)..(9417): n is a, c, g, or u
gcgaaagggggacagaaacacggcaggagaaaggcgcgcgcccaccagcgagaaagcaaacgaggccgaaagccccccagaaaaaaccaaggcgaggcgaacgacgaagggagaagggaaaacacccccggaaaccggcaggggaaggccagcagaggcggacacagaggaagggccacagggaccacacccccgccccgagccccacggggccccacgccggggcacagaagccgggcaccggaaccgcccaccggcggacagagccgccgccccaccccgagaagccaagcccgccgacgaaagcccgggccccaaccccccacccccggccaggagcgagcagagcaggaccaagaccgggcagggaagccccgagccggcccccccaaggggcacacaggaaacgcaaccagccaagagcaaacagcagcgcgcccgagcgcccagaggaagcagggaccacaacgaggaaggcagagcaccgggaggggggagccccgcagcacacgccaggcccaacccagccgaggaggcgaggccgagaccaaggcaccagagcccccgccgagacacacacacacaaggagagcccacgacgagggcaggacagagcccccccccagcgggccaggggccgggcaacgcgcgaaccgagggagcgaagaaccaagcgggacagaagcaagaagggggaaggaagggcagccacccaacccaagcgaggggggccaaaccggggcaggggaaggcacacagagcagggccaaaaacagaggagggggagagagcacgaggggacagcagacgggggaccaagacagaaagagacaaaaagcaacaaggccaggggccaaagccaagcccgcaaaggcaagaccccaaaaagacccacacaagccagcaggaggacgccccaggcgcccaggaagggcagagaggggacgcggaggacaccccgcgagcacggcccaacaccaaggacgaggccgacaggcacaaaacaggaacaagagcggaacagaacccagcacccccgggggacccacggggacccgagcaggcaaaagaaggacaacgccggaggcccacccccgacggagggacaaagcgcaaaggcaacacccccccccccagccccccaccccacccagggagggcgcacgcgggccggcgccagaggaacgggggcgggcacccagcagagaaggcccgaggaccaagaccaggggccccaggggaaacgcgggggccgaaccgcagggccaccgagaagcgcaggggccgaggggagagcgcagggcggggaaaacaaacacagggaaggcacaaaggccagcaaggcacaccacgagaaaacgagcgcacccagccggggcagagggcacgaccgggcagaaacaccgggaagcacaccaacccccgggacggccagaggcccagagagaagcggcgccagggcaccgcaggagccgggagcgggagaggccacacagaccccagagccaagagacgaggggcaggacaccggcagcccgagccagaggggacagccgggcccaagcccaagcaggcggaggcagagagacgcccggcccagcgaggccaagagggccaggcgagcagagcagagcgccagacccccaaagacggaagccaagaagacgcaaacgaccccgccaaccgaccccagaaggccccaacccaaaacccaaacccaaaagaccaccgagccacccaaccacaaaagcagacaacgcagagaacgaagacaggaggcagcaggccgaagcaaccccagaagggccccacccccacaaagggagggacaggagacgaaaaagcagacaagcggcaagaccagcaaccaggaagacaacaaaaggacaagggcaacgcacagaacacaagcaccgcagccaagcaacaaacacacacgaacacagcagcacacaacacaaaaacacagacacagacaaccccacccgaaagcaaacacacccccccccaggaggagacggggggaaagcaaagcaggcaaggaacaccaagggcccaacaccacgggccgaaaaaagccccgaggccccagaaagccccacaaaagccgaaagcccgccaggggagacacacgaaccaggcaacacaccccaggcaagagcccccgacccccaacgcaacagcagggcacacaaagcagcaacaaagggggagcagcggacgaaaggaagcgcccaggcaagacagaccaaggacgaaaaggaagaagaagaagaagaagaggacaaacagggagagaaaacagggacacgaaggaggccccgacaagccccagagaagagggcggagcggcacggaaagagaacaagaggggcaaggaaggcgaaggcagagccgccccagaggggcaggcacagagcgagcgaccccagaccacagcacagcaaacccagaggcagcaggggaagggggccgggggagggcagcaggagcagagaaccaacggagagaccgaaaagcccacaccccggacaaaagcccccaacccacacagccaccaccagcggcaggagagaacagaggccccaccagaggggcacccaggaaaccccaaaaacaagacccagccgaacgaagcaggaacagaggaagacccccggcaagcgaacagccacgcacccccacacagaacaaccagagcaagaagaaaggcccacaccaggggggaaagcaaaaaaagccgagagagaaccaagagaagaaagacccaaaaacaagcagcggcaagagggaaagacaagacagaaaaaaagcaaaaaaaacccaagccaaacaaaggagagagacaagggacccaaccaccccagggccaaccccgcccgagaagaccaggcaaccaccagagcccacgggaggcggagagcaacccccccagcacggcccaggcaggccccccccgcccccccccaggggagcaccaggcaaagccagagccacaaaccccagccaagagcgaggaaccagcccaccaaagggaaaaaagccaggaagaacccacgcgggcaccgaccacaaaccacccagcaacccgagaggacgaaccccccagcgccgcccgccaaccacggccagggaaaggaggaaaccgaagggacggggccagaggcgcgagcaggaacccaaggcccccgggacagcggagacagggggaccagaggcccagggccaacagaggagaaggcccagacaggccagcaaggacccgggccaccggcaagggggggaccaagaggccaagcaaggaccaggcccacccagcgaacagaggccagggacaaaggaccaagccgaaagcggcacagggagcccaggggccaagaggaacaacagacggggaagagaaacaaaagcaaggggagaacagcagaccccccaggggaggagcaagaacagacccagaacgaaagcgcacacgagagcggggacagcccagcaagcgaacacgggcaccagcgggggaccgggaagacgccagcacccacaacaaagcgagcgaaccgcacgagggagggaacaggaggaggccaagccagcgaccacgagcggcgaaaggagccagccaggagaaccgccaaaaaaaagggagaagacgagggagacaccgccagaccgccaggcacaaacgggggccacacaaggacacacacagaacacacagcaaaagagggggcacacagcccacgagaggagggggcccggcaccagaagaggcagaagaccacagagaggcaaagaccccaggcaccaagcccggggcccgacccaacccccgagaggacaggagccacaagagaagaagaagcaccagagccgccgcccaaaggagagacacccgagagggcaaacacccaacacaggaggaggagacacacagggggaggaagggaacccggcaccccaagcaggcaaaacgacaagagcaacagaaggaaggaaggaaggaaggaaggaaggaaggaaggaaggaaggagggagggagggagacgcccccccgcgcacgccccgggccgggcgggagcccggccccacgaccgccagaaaccagccgccaggaagcaaaggacaccccaaagccagccaggcgaaggaaaaaaaaacagaagggcaaaagaaggagaggagggaagagcaccccagacgagacgagacaaccgccaccaagaaaagggagccacggcgcagagcgcggacccccggggagacacacaaaagggaggggcaagccgaccccannnnnnnnnnnnnnnnnnnnnnnnnnnnnnnnnnnnnnnnnnnnnnnnnnnnnnnnnnnnnnnnnnnnnnnnnnnnnnnnnnnnnnnnnnnnnnnnnnnnnnnnnnnnnnnnnnnnnnnnnnnnnnnnnnnnnnnnnnnnnnnnnnnnnnnnnnnnnnnnnnnnnnnnnnnnnnnnnnnnnnnnnnnnnnnnnnnnnnnnnnnnnnnnnnnnnnnnnnnnnnnnnnnnnnnnnnnnnnnnnnnnnnnnnnnnnnnnnnnnnnnnnnnnnnnnnnnnnnnnnnnnnnnnnnnnnnnnnnnnnnnnnnnnnnnnnnnnnnnnnnnnnnnnnnnnnnnnnnnnnnnnnnnnnnnnnnnnnnnnnnnnnnnnnnnnnnnnnnnnnnnnnnnnnnnnnnnnnnnnnnnnnnnnnnnnnnnnnnnnnnnnnnnnnnnnnnnnnnnnnnnnnnnnnnnnnnnnnnnnnnnnnnnnnnnnnnnnnnnnnnnnnnnnnnnnnnnnnnnnnnnnnnnnnnnnnnnnnnnnnnnnnnnnnnnnnnnnnnnnnnnnnnnnnnnnnnnnnnnnnnnnnnnnnnnnnnnnnnnnnnnnnnnnnnnnnnnnnnnnnnnnnnnnnnnnnnnnnnnnnnnnnnnnnnnnnnnnnnnnnnnnnnnnnnnnnnnnnnnnnnnnnnnnnnnnnnnnnnnnnnnnnnnnnnnnnnnnnnnnnnnnnnnnnnnnnnnnnnnnnnnnnnnnnnnnnnnnnnnnnnnnnnnnnnnnnnnnnnnnnnnnnnnnnnnnnnnnnnnnnnnnnnnnnnnnnnnnnnnnnnnnnnnnnnnnnnnnnnnnnnnnnnnnnnnnnnnnnnnnnnnnnnnnnnnnnnnnnnnnnnnnnnnnnnnnnnnnnnnnnnnnnnnnnnnnnnnnnnnnnnnnnnnnnnnnnnnnnnnnnnnnnnnnnnnnnnnnnnnnnnnnnnnnnnnnnnnnnnnnnnnnnnnnnnnnnnnnnnnnnnnnnnnnnnnnnnnnnnnnnnnnnnnnnnnnnnnnnnnnnnnnnnnnnnnnnnnnnnnnnnnnnnnnnnnnnnnnnnnnnnnnnnnnnnnnnnnnnnnnnnnnnnnnnnnnnnnnnnnnnnnnnnnnnnnnnnnnnnnnnnnnnnnnnnnnnnnnnnnnnnnnnnnnnnnnnnnnnnnnnnnnnnnnnnnnnnnnnnnnnnnnnnnnnnnnnnnnnnnnnnnnnnnnnnnnnnnnnnnnnnnnnnnnnnnnnnnnnnnnnnnnnnnnnnnnnnnnnnnnnnnnnnnnnnnnnnnnnnnnnnnnnnnnnnnnnnnnnnnnnnnnnnnnnnnnnnnnnnnnnnnnnnnnnnnnnnnnnnnnnnnnnnnnnnnnnnnnnnnnnnnnnnnnnnnnnnnnnnnnnnnnnnnnnnnnnnnnnnnnnnnnnnnnnnnnnnnnnnnnnnnnnnnnnnnnnnnnnnnnnnnnnnnnnnnnnnnnnnnnnnnnnnnnnnnnnnnnnnnnnnnnnnnnnnnnnnnnnnnnnnnnnnnnnnnnnnnnnnnnnnnnnnnnnnnnnnnnnnnnnnnnnnnnnnnnnnnnnnnnnnnnnnnnnnnnnnnnnnnnnnnnnnnnnnnnnnnnnnnnnnnnnnnnnnnnnnnnnnnnnnnnnnnnnnnnnnnnnnnnnnnnnnnnnnnnnnnnnnnnnnnnnnnnnnnnnnnnnnnnnnnnnnnnnnnnnnnnnnnnnnnnnnnnnnnnnnnnnnnnnnnnnnnnnnnnnnnnnnnnnnnnnnnnnnnnnnnnnnnnnnnnnnnnnnnnnnnnnnnnnnnnnnnnnnnnnnnnnnnnnnnnnnnnnnnnnnnnnnnnnnnnnnnnnnnnnnnnnnnnnnnnnnnnnnnnnnnnnnnnnnnnnnnnnnnnnnnnnnnnnnnnnnnnnnnnnnnacgcgaggcagcagccaggcagagcaggaggcagagagagacaagccaggagcacccccccacccccccccccccaagcgggagaagaccaggaaggagcggggggcccaccaaaccaaccagaaacccccacagaagagaggcgggccaaaaagaaacaccggagggaacaggacaagcccccccagaggcccccagggggccagcagccgcagccagggcaccccggggcagaggccaagaccaagaacaaaggggagaccccccccaaaccaacaagccacacgacccagccggaaaacgagcagggagaaaaagccagaccacggcagagaacgagaacgagcagagaagaggggaaccagggcacagccaaacgacaccaggagaaacacaaagcagggggccaacacccaaagccaaccagcaggggcagggaggcaggagagcaagaccgggagccacaacggcgcacaccaacccacaccggaacaacaagacaggccaaacaggcgcaagagggacaacacggcagcgggcgcagcagagagagcgcgggggccgaccagcaacaagccaggcacggccgccagccccggccagggcgagccgaccccccaggaggcacgaccaccccccaccagagcccaggcgaggccaccggggggaacaacacgagacacagacacggagggaagagaagcagacaagccccggccaaaccagcacaaaccccggacaccgaacccagcccgccacaccgcaggaaaggaccacccacacaacggcacccgacaccgggaggggagggggggggggggggcaaggcaggacgaggacggcaaggcgggggaagagaggccagaagacaacgaggccaccagggacacgggaaaggaaggcagacgggggcgggccggccagggaccccccaggggccaccgaccgccccccaacaagggaaaaaggcaccaaggcacccagcgagggcgaggacgaagcccgaccaggaggaagcacgagaacgaggcacccggagccagacacagagaagccgggagcaagaacgcccgcgagccagaaaacacgcggcaggcagcggccacgccgggagccggcccgaccgccaggggagaccagccgcgaccccccgagagagcccaaccaggcaccgaccaacggggcggacggaaccagggaggacccggccccccacaaggggccaccacgcccaggagcccacccccccaaaccgccccccaccaagaacccacggaaaagccaccgacagggcggccaaaggaacaaaaaaaaaagaaaagaggacacagacccgggagccagggaaccaccacccgggaaacagcggcaagagagcacaggagacccagacaacaagcagcaggacagcccagcgaaagccaaggcgaaagaaagaagacccggagggccagccacccccaccagggcaacggcggccaaggaacacgccgcaacaaagagcaagaaagagcaacaagacacgccccaaccacccgagggacagnnnnnnnnnnnnnnnnnnnnnnnnnnnnnnnnnnnnnnnnnnnnnnnnnnnnnnnnnnnnnnnnnnnnnnnnnnnnnnnnnnnnnnnnnnnnnnnnnnnncgccccaccacccgagggacagacacacagcccgagaaggaagcacacagcagcccagaaggcaccggaacgcgggccgcagcacacagccgggggagaagacaccacccacagcgccggagcgggccacggcacaggcacaaccgggggaccaggcaacggaccacaccagggaagcacgcgccagcacagacaagggcggcacggcaaccaggagcaccacacagcgggggcgaaaaaccaccgggccgacgcagagacggccggccacccaggcgcggccaggccaccagaccaagggacgcggccgcagcagcgaccagccgcagaagaagcaagcaggaagagaaagccaacgaaggggggcagacagaggcaggggccagcgggaccgacggggacagggaaagacccgggcaccaacagcagagccccagaggacgaggaaaaggaaacaccaggaacaggcaacacagcccggaaaggggccgggaccggagagaggcgggaaggcggagagaaacacaggagaagaacaaccagggagaaagagcagagcgaggccgggagggggaggggagcgcccccgagcgcccacccccagagcagaaggcaaccacaacccaacccgggagacacagcggaaaagggcccaaaaggcaggaagaggggcgggcccccccccccccccccccccccccccacccccgccaggacaaccgcaaacagaaggggcaaaggagcgcacgggacacagaacggacaggagcggccacaacaagaacccacagagcccaggaaaaacaggaagggagacgccagggcccgggacccacacagccggggagggagcagcggagacaaccgacggaggcaggggaggaggagccaggagcaacaaacacccagaacaggccgaggaaggcacccacagacccacagaccagcgagacaggggcaaggacacccaaagacgcccagcgacaagaccggccaacaggcaagccaggcaagagaaaagccaaaaaaaaaaaaaagaagcacgaggcaaaacannnnnnnnnnnnnnnnnnnnnnnnnnnnnnnnnnnnnnnnnnnnnnnnnnnnnnnnnnnnnnnnnnnnnnnnnnnnnnnnnnnnnnnnnnnnnnnnnnnnnnnnnnnnnnnnnnnnnnnnnnnnnnnnnnnnnnnnnnnnnnnnnnnnnnnnnnnnnnnnnnnnnnnnnnnnnnnnnnnnnnnnnnnnnnnnnnnnnnnnnnnnnnnnnnnnnnnnnnnnnnnnnnnnnnnnnnnnnnnnnnnnnnnnnnnnnnnnnnnnnnnnnnnnnnnnnnnnnnnnnnnnnnnnnnnnnnnnnnnnnnnnnnnnnnnnnnnnnnnnnnnnnnnnnnnnnnnnnnnnnnnnnnnnnnnnnnnnnnnnnnnnnnnnnnnnnnnnnnnnnnnnnnnnnnnnnnnnnnnnnnnnnnnnnnnnnnnnnnnnnnnnnnnnnnnnnnnnnnnnnnnnnnnnnnnnnnnnnnnnnnnnnnnnnnnnnnnnnnnnnnnnnnnnnnnnnnnnnnnnnnnnnnnnnnnnnnnnnnnnnnnnnnnnagaggcgagagcacagccccccccgaccgggaagccgccccagggggcacacgccccaaccccgcccgagccaagggcagaacccgggcaagccacccccagaagaggagacggaccgaacaacagcccagcagaacgaagaggcagcagagacgagacagacaccgacgggagaacaagcaacaagcaccgcacggcgcccggagccaccaggcccgcacagcaagagcggagccaaggcaccccagccaaaggagcccaagaccaggcccacaccaaaacccccaaacgacagccaagaaagacaacccagccacccgacagggcacgggacgggcgggaggcggcacggcacgggagagaaggcccaacccacacagacagggaccgaccgaaacaccccagcagagacaagaaaggaccgaagaaaaaggcagccaagaagacaagcgccacaggaccacccaagcaggaccagaaggagaccacagaagcagagagagagggggccagggcaggaagaggggggcggggcggggaacagcgaggagagcgggcaaaggagcgaggacacccgcaggaagaagcagcagcagggggcgaggagaacggcgagaagggaacggggggccgcagagccagacgagccgggcacaggaaagccagaagaggcaggaacccagaacgggaggcagacagcggaaggccacgggggccagaacagccggaagagcagcaggccaaacacgacacaggccacaaccgaaaaaaagagcaaagccaggccgagaccagaacacggggagagacaagaggcaagggcaaggacagcccaccacaaacaagaaaggcgacgaaaagccccccacaacacacaacaacacaagcaagcacacgacacagcagcacaaggcaaaagcaaggaacaaaagcacaaaaaaaaaaacaaagaagcaaaagacacaggaaaccccaagacaggggaacgaagacaaaaaaaaaacaaaaaaaagaagagccaagcaggggggggcaccacagcagaggaggcagagagggggaggggggaccggaggaggcagccggcaacagcaagccagggcagccagggacacagaaaaagaaggagaagagaagaaggaagcagaggaggaggaggaggaggaggaggaggaggagaggaagcgaagaggaagaggaagaggaagaagaagaagaagaagaagaagaagaagaagaagaagaagaaagaagaggaggaggggggagggggagaaggaagaagaaaagaaaaggaaagaaaagaagaggagaggcgaggcgaggagaagagagaccccccacacagccgcaacgaacccgaagaagaaaagacagcaaagcaaggaaacgagagggggaggcgagcacggggggggacacacaaggggggccccggccgaagaagaagcaccggcacgaaccccgaggggcccagcccaaccggggagacggcaccgggagggggcagcgcagagcggcccgggaaccaaaggaccaagcaccgcaaagcccacggcacagcaacacccccagcaaggaagggccagggccagcacaagcaaacaccaaacaagaacgggaagagcaagagccccccgacaagccccacaaacaaaggagcggccaggcggccgcccccgagccgccagcacaaagcaccaaagccagagcagaaaacccaagcgagggccaggccccaccaccgggagaaagaaccgcagacgaaaaaaaccacagcgacgcaacaaccagacgcaaaaaaagggcgagcaggaaaccaaggcaaaaggaaaagcccccaaaagaggaaaccgcgcacagaaagaaaccagggaacgaggcaagcagaaagccacagcggacaagggcagaaacaagcaccacaaacacaggcaaccgaaacagacaaaaagcccccacccgcacaaggagcacccccaaaccagggaggccaaggggaaaggagagaaaggcaaggacccgggcagggccgacgccaaaccagacccacccgcacccgagacagcagagacgaagcaaagggaccagacacaaaggccccaccacggaacggacacccgacaagaaaaacagcaagccacccaacagcacggggaccaaaccggagccggcacagggccagggccaccaggagaaagagcacacagacccacccagccccacccgcaggcagcaccagggcccagcaagcagcccaagcacgagagagaaaacagagccaacagggacagacgcgcgacaggccaggcgacaaaggccaccagcagggcagcaagggcagaggcgagcccaggcaccaccaacacgaaacgcaaggccgccagcacaccaacagaaaacaaagacaccacagccagccccgaccgagaggcacaacccccgggccggggcaggaagacaagccaaaaaaaaccagcgcagaaagccagagagcagcacagagcccccgcccgcgaaaacagcaacagaaaccaccacccgcccgcaccgcaaaaaaaaaaaaaaaagcgcaccagacgccaccgggccgggcgcacccgcccccaacagacccgaaacaggcaaagaccgagggccccggcaccccagccccagaggcagccacaccgcccccacgcccccccgacgcagagaggggggaaggggggaggagggcaaagaccgagaaggaggccacagcaggggaacaggagccgccagggaggcagacacggcccagacagaagagcacgaaggacccacaccggagagaaaacaagccaaagcagcgcaggggaggaaggcccccgcgagaaagggcacccgaggccagcagccaccccgcggcacagacccaaggcagggagggaagggggaggaggccacccaggccacacagggacaagagaagggccca

SEQ ID NO: 664 - RNA, 537 nt, Mus musculus
aaacaacaaacgggcggcccaggggaagggaagggagcccagcagagcccaagcggcacccccccccacaccgagacacaccaccaaacaccccccaaaaaacacaaaaaccaccggcccagcaaccagggcgagacagggccgaagccggcgccggaaccacgagaacaggcggcccgaaccgccgcccgcccccggggcgggaaaaggcgggccaccacgcccaagaggaggccaaggaacaagcaggccgaacgagacccgcccgcccagagagcggaacaagccggccaaggccgaccacacgggaacagcacaggggccgccaagggaggcgccggagcagggggagggcaacgccaacacagcagaaaggagcaaccacaaggagaccaggcggcgaaccagggaccgccgcccagcacgagggaggcacaggaccgccaccacgcgagcccagacgacggccaccgcaaaacgggaacaggcgggcgaccggcgccaaaacggggggccagacagggccggagccaggcg

SEQ ID NO: 665 - RNA, 9915 nt, Mus musculus
ccccaggaagcggagaacgagcacaggagcagggaaaaggccaaacagagccaaaaggccaccaggcaaccagccggcacaccagaacgcaggaggaaagacaggcacacggaaaaaaagaagaagaagaagaagaggcgaggggcaggaacagaggaggggggcgcagggccccaccccccccccgccccccaacccgacgccgcacacccccagaacaaagcgcagaccaaaaagaagaaaaagcagagcaggcaaggaagcagagggcggcacagggaagaggacgccgccccccacagagcggggggccccgacgaccgagcggaggggcacaacgcgagaccagcacagagagccgcccccacccccagaaagcaggacagcagaagcccaccccaaggcccgggggacggagaggcagccagcagaaagagcacacgcgcagagggacgggcagcccaaacacaacaccaggcacacaacagcagccaaaagccaacacacaagcaagaaagaaaaaaagaaagagagagagagagagagagagagagagagagagaaagacagacagacagacaggcaggcaggcaggcaggcaggcaggcggccgggcaggagcggcgggcgagccggaggggaaagagaagggagacggaaagacccaccccccgaaagaaggaagcacaaagacaagaaaacaggcagcagggccgcaggacagccaagcaaaggagcaacacaaggaccagcgcccgaagagcacaccaggcaaggacaacggaaacacgacagacaccaggcaaggacaacagcacacgcgacaggaagcgaaagcagcgcgcaagcaaaacaacagccagcacccgacccgcccccaggcaccccaaagcacccacagagcaccgaaacacggacccagaagcgaggcaagcaggaccaggggggggcgagacagggccgaagcccgacgccggaaccacacgagaccaggcggccgaaccagaaacgccgccgcccccaaggcgggaaaaggcagcgccaccacgcccggcaggaccagaccacccgacccaacacagacggagcccgagcagccaaagcacaaacaacagcccaaagccacgcacacggacacacccacgagcacaaagacaaaaccagcaccacacaagcccccagggagaaaagcccagcccacacccggccacgagcccggcgcaccagcggacccaccacggaacacgccgcccggagccacgagcacgcagggcgcacaccgaggcggaacacccccgggcaacacccacaagccgccaagccaacccccaaaaacccaacagacaaccaggcggaaccacgggaacagcaaagcgaaaaaaggagcggacaaaaccagccgggcaacacggacggggccgggccaacgccaccagaaacacagccacgcaagcaccgaacccgggagcaaaaccgggagcaaaacccgagagcacaagcagcggcaccacacaagcgaggagaccaaagagcacccagccagaaagcggagaagacggccgaaccaagagaccaccaccggccccgaggcgggagaaccaggggcagccaaggccaccccgagcccaccccacccaacccccaaacaagcagcaaccacaacagggcaaccacaaaggacagcccagacagggaaaagcaaacacagcacaagaggcagggcaggaggacaggagcaaagacacccagcacacagaagaaggcaacacagacacgagacgccagaaaaaggaaaaagagacaggcaccagacacaccgaggagggcacagaccaagagaggggagccacaggggcgggaagaaccaagacccggaagagcagcaggccgaccacgaaccacccagccccacaaaacaaagcgggcgggcagcaccaaacagcacggaggcagaagcaggcagaccgagccaggacagccggcaagaaggagcaggacagcagcacaaggagacccgccaaacaaaaaaaagaagccaccaaaaaaaaaacaaaaagccacaaccagagccgaacacaagggcaagcagcacgggggccgaggcagaagcacgcaaaccaagacgcgggcaaaaggagccaagggggccacgggaacagcaagaacaaaccaaaaaaagaaaaaaaagagagaggggcagaccggaagagcaggagagggccagcacaaacaaaaccccggcaaccccagagaaaaagcacaaccaaggcggaaaacaggaacaaaggccaaacacaaaacacccacaaaagaagcccccagcaacccaccagccccgcaaggccagacaagaaacacgccccacagagcaccgaacacaaaggaacagaccaacaccggcaagagaaccgacaacagcgagcgccacagagccagcaaacccgacagccgcaccgggggcaagcaagcccaaaaaagcccaaggaccgaagcgccacccagcccacccgaagcggaacaaggaggcagggccagcagaccccacccggaccaaagccagagacacagaagggcaagaaagcgagaccgggaacaggggaaaggcagagagacaagcggcaacacgagggacccgagaccacagggggaagaaagaaccgcccccagacccgaccccccccaggcacaggcacaggcaaagaacaaaaaaaaaagcaacaacacacacacacaacaaacacacaaaaagaaagcacaaggccaggagaggaaccaaccgcaaccagcacgggagacggaggcagaaggacaagagccaggccagagggaacagcaaacacaaaacagaaagcggacaaaccaaaaagaaaaaaagaagacacgagcgccagacacccagaagaggacggggaggggagccaccaggggcgggagaaccggacccggaagagcagggggggccacccacgagccaccaccagcccggacaaaccacaagccgggccgaacaacccaaagacacacagaagcaacacaacagaggagaaagaccacaggagggagaaaagccgaaaacagcacacaccgccccagcaacgcagggcagaagggcacacaagcccaaaaccgcgcgccaagggcagaacacaaaagccccaaggccagaggaaaagaccgccagcgagagcgacgacagcccagggaagcagagacgcagcagccaggcagaaacgccccaaacaaacacaggaaaggagggggggcaggcaccaggcacaaggacgggcagcggcagaggaccccccccacaggcagcggaggcaaagcaccccagagggcgcacagaagcagaaagcgagcaccagccacaggcacaacgaacccagcaccagcaggcggaggagaaggaaagagccaggaccaaaacagggggagggagacaaagaaagaaaggaggggcgggcagggggcagccaacccagcacgggaggcagaggcaggggacgagcaagaccagccggcacaaaggaccaggacagccagggcaacagagaaacagagaaacccgaccggggaaaaaaaaaaaaagaaaaagaaaaaaaaaaaaggaggggagggaaagggaaggcagaggagggaaggcgaaaaggccgcggcagaggccaaacagcacccaaagccgaaaagaaggccagccgggagagaggaaaaggccagcaacagaaaaccgaccaaaaaaaaacaaaagagagcagagaaagccaacggaaagcaccgccaaggccaagggcacaggaaacccaaagacaaagggaagagaaaaagaaaaggaaaagagagaaagaaagacagaggcaaggaggagggaggaacccagagcagccagaacaagaacaccgagaaaagggggaagcacaggcgcgggaaaagaacccccgcgaaacaagaccccagccgcggaaccacagagaccagaaggccaaaccacaaccccgccgagcccccgagacggcaacaggaaaagcacaaccagcaccaaaagaaaaacaggaagcaggggggacaccgaagcccagaacgggaaaggcagcgcaaggggaagcagaggagcaacagaaagcaaacaacaagcgaaaaagcagaagagagcaaaaaccagaaaaccaccccaagcaggggggacgaaagggcgaccacaacgagggaaaaggaacaggggccaaagaaagaagacagacaagggaagacacgcggggcgggcaggagagagcgagcgagagcggggcgggcaggagagagcgagcgagagcggggcgggcaggagagagcgaaagggaagacaggaggaggacagcaggcaggagagagcacaggagcacaggacacgagagggaccaaagcagaggcagccacacgcgggcgacccacgccccaaacacaaaaaccagccagccagagccaccacaagcggcaccaaaaccgcagcccacaccagcgaaggagagcacgagaagacaaccacggaaccaccccaaagcggggggcagaggggcgagcaccaaacaccgggccccaaggccagaaaaggggcagaacccggcacggagacagacaggcaacgccaggggcgggaaccaacccaggcccgaagaacagcagggccaacgcgagccaccccagacccagggcacacaaaacggggcgagacagggcccggagcccggcgccggaacaaccacgagaccaggcggcccgaaccagaaaccgccgcccgcccccaaggcgggaaaaggcagcaccaccagccggcgacaagcaccgaaccaggccaaaacagggagcgcaagggaagggacaaaaagaggcgacggagcgaaggcaagcagaggccccagcgcagcaccagggcccaaggagagggagcaagggaggggggagaaggggagagggaaagagagaacaaaaacagaggacagaacccaacagccaaagaacaaagacaacagaaaacacagaccaggccaaacagggccagacgggcccgggggggaggcaaaaggcccccagggacacccaagaccacggaaaaaacaacaacagcacagcagcaggaaagacagcaccaagagcaacaaaaaaaaaggaggggcaccacaagggaacgaaaagggggagaaccggaagggacaacacgcaaccaaagaaagccgcagaacacagccccacgggacggcaaaacccccccccccaagacaaggcgcaacagccagaggcccaacagaccgcccaaccccaaagcgggaacaggggaccaccacacggcacaacaccaacagggcacacagaccaccgaaacccacacaagagaaaaacaccaggagacaagacacccccgcacaggacaccagacagaggcagcacgcagcagggcccaacccaagaagaaaacaggaacgccccaccaaagaggcgagggacaggcaaaaagggacacacaaaaccaaacaaacgggcagcacgcaaaaggcgaccaacccaggacacaaaccagggaaagccgggaaggaccgggggcaccgggcaacgacaacggaagaacacaaccagaaggagggaccggaccagacgaggccagaagacacaagcgaccggacgacaggagacgaggcaagggacagaaaagcaggcccaggcaaggcgacacgccaaccaggagacgaggcaacgagcaaggagcaggaacaaaacaagcccagaccagacggggacacacccgcggaggcccacgggcacggaagaaggaagaaccccgccgcacacacgccagcacacggaacaccacagaagcagcaaacaacagccgggaacgagcaacacagacggagccaccccagcgcccagggggaacggacacagaccaagcacacaaaaacccccccacaacaaaaaaaaaaaaaaaaaaaaagggaaggggaggggaaagggaaagaccaccaggaagaggcgcgaaacaaagaagggggcagccgggcgcgggcacacgccaacccagcaccgggaggcagaggcagaggcaggcggacgaggaggccagccggcacaaaggagcaggacagccagggcaacagagaaacccgccgaaaaacaaaacaaaaaacaaaacaaaacaaaacaaaaagaagggggcaccaaacccaaagacaaccaacgaacaaacaaaacagcaacacacagaaacaaaacaccacaagcaggaaggggccagccgaacccagaaggaaaaagagggagacaaaacaaagaggccacagggcaaaaaggggaaaaggccagccagggaaagcaagacccacacaaaacaaaacaaaaacccccaaaccccaaacaaaaaaaaaacacaggggcggcaagaggcagcggaaaggagccaccaaaccgaaacaagccacccaggaccacaaggaaaaagaaaccgcaaggccgaccccacacaaagcagcaccccaaaaaaaacaaaaaaacccagcacagcaaggagagggagaccaggaaacaaacgcgagcgccagaacaccaaaagagggcacagacccaacagaggggagccaccagaggcgggaagaaccaggaccggaaaaacaggccaaccacgagccaccccagccaacaaacgccacggcgaggaaaaccagggcgcaaacaggaggcagcgcacgagcgacccagaccaccaaccgccccacagggccccccagccgcccagcgaaacggcgcggggcccaagacacaggaccaaggaaagaaaacaccagcccaggcagcaccagcgaagaacagcacagagggccagaaagcagccaaggacggacccaccggccgaacccagaggcaacaagaacacagcgaaggacccccccaaagacaagccagcccacacacagcaagaaaaccaagggacgaggaaagcaaaacacacaaaaaaacagaaaaacagcaagaacagggcaagaggaaaaacgggccagaagagaaaccaaacaccccagcgacaagaagcgaagcagaccagaaaagggcgaggagagcacggcgccccagaggaccagggagcaccacaggggaacacacgaacccagccaagggagaccccccccggccccagggcacgcaacacgggacacagacacacaagaggcaaaacaccaagaaaaaaacacacaacaaaagcgaagcacggagaaaaaacacagacgggcacggaacacacaagacacaagccaaagggcacccacccagcagggcgccacaaccaggccccccacagcacaccccgcaacccccacccgacccaaacaaggggccccccaaggccacccggccaacacccccgccaacagcaaggcaagcaagcccccccgcacaccgaagcaaaaaagcgggaaaaagcaccgagacagggccgaaccggcgcccgaaccagcgagaccaggcggcccgaaccagaaaccccgcccgcccccaaggcgagaaaaggcaggccaccagcggcaaacaccagagggggggggggggggggggggggggacgggccggagcacggcaaagaaccgagaacaggcggcaaaccaaaggacggcgcccaccccaaggaggaaaaggaagccacaccacgaccccccaccaccaaaacaccccagaggagagagccaagggcagagaccaggcgggggacaaccgcccaaagggagacagaacaaaacccccccgacccacacccgcaccaccccaagcgccacccacagcagaaccaggcgcccagcacgccaccaccccgacaacccacaccaggaaccccagaaccaagagcaagcaaagcaccagaccccagcacccaaggaaaaaccaaagcaagcccggcgaacgaccggaacccagcacgaaaaccagaaaccccccgcccaaacaccggcggacacaaccaacagcagacgccgacccgcaaccccaacggaccccaccccaagccagcaggagggaagcccacaacagggggaaggaccaagagaaacacagccagacgacacgaacaggggacacagccaacccgacggggggaaaaacaaacagaaaggaccagcaacccacaacacagcccagagaagaaagggcagaagcgcgccagggcagaccaaacagcaaagcaagagaacgggacacaacccgagcacaccaaggcaggggggcggggagagaagagaagaacaccgccaaagggccccgggaaagggaagggaaagaccaccgacgggaaccgaaaaaaaagaacagcaaaaacagacgcacgggccaaaacagcaaacacgacgcggggggcgcaacccggacgagggaccgcccgaccaacacacggcaaggccccgggaggaagacacaagaccccgggcgaagccccagcagcgacgagcacgggcaaggcggagaaggagagaggcgggaaccacgcagaccggcggcgggacaggggcagagcaaccccggggggaggagaccgggcagggagaacccggcgccccaacccccacggccccagccccgcgcgcaccagcccccgcgcccccgccccgcagcggagggaaaagagcgagcaaggaaacagggcaacaggcggagacccgacgcccagaagccgccagccccgcccagggaagccccaccccaagggaaccaggccgccccgcgccgccggcagagcccacgcgcgacccggcgagggcgcgggagggcgcggcggcggacgccgcgcccgcggcgcaccccggacgccacgcgccggcgaaagggcgcccggggccgcccccagcgcccgcgccaacccccccccacccccccccgccccgcgccgccggccggccccccccacccgacccccacagcacccgcggccccggcagcgccgacgcaggcgcacgcaccgcgccgccgccaggccgagccgggagcgaaaaccggcgcggagcgccggcggcagcggcgaccagcagcagccgggcgggcgcgcggagccggccggggacgccaggggccggagcggggagcggcggcggagcgggcgccgcgggggggggcgcgaaggaaagggggcccggggggaggaggcgcgggccgcccagggcacgaggggccgcccggcggcgcggcgcagcccggcgccagcgccagcgccgccgccggggggggcccccaccgcccgcgcggcgcggccgccgccagcccggcgccgccgccagggccggccaacccccccacgcccgcccgcccgcccgcaagcccccccccaacaggaggcccggcggcggggcgacagaggccgcgcgccggcgacccaccccgccaccccgaggccggcggcccggcgaccgggccacggcccgccccgcccccccgcgacggaaccccaccgagcggaccccgaggccgggccgccgcgccgccaggggcgaaccccggccggccgcagccaggcccggaaccggggggcgggcccgaccgacgcgcccagacccccaccaagccagccggcccggaaccacccgaccccgcggccccagcagcgggggcccagcccgagccgacgccccgcgccggcccgcgccgccgaggcgcaggcggcgcgcgggcgcgagcagaggggaccccgagcgccgagagcccccgcaaggcggcgagcgccgcgcccgacgccgcccgagcgggcgggggaacgcgcgccgccgcccccgccgggccccgcgcgcccccaaaccacgccagggcacgcgcgggacccgaccgggcggcccccaagggcgcggaaaaagacacgaaccgcaccaaagagcccagcgacgcacccagccccgaaacgaagcagcagac

SEQ ID NO: 666 - RNA, 2304 nt, Mus musculus
gccgaccaagaccagccgggcaaccgccacaaccggcgagcaaggccggaggacccggcgggcccaaccgggaccccaggaggacagcccagccacggaccagcacccgccgccgcgccccgcccccccgccgccgcgcagccgcggagcacgcacaaccggcaccaccaccgcgcggaggcacgcacgaagaaacgggccagagaggcaaccaggcaagaggaagacgcggaggagaaacgagcgaacccgcaggcgggggagcggggaggagagggagggcggggggagcggcggcggggaaaccggagccgccacaagagcacagcgcgagcggccggaaagccgggaaggacacccaccgccagggcaagcaagcaaaagccaaacaagagaagcccacccaaacccgaaaaccgagagaaggaaaaccgccagaggcgggaacgaagaaagggcccgagcccacgggggacgcggcaagaaggcaaaaaccaaagaaagccgcagccgggacagcggggaccagaagcaaccaaaaggcccacgacccgcagcgcaccaacgggcagcgaccccaagagcccccaggcccaagaaaccaccggaagcaaagccaggcaggaaacagagcagaacggacaaccggaagcggcacaagcacaaagcccccccgccaccagcagcacccacaacaagccagggaaggaacaggaagagggagaaagaaaagcgccccaaaagagcccaccacggggcaaacaggcaaacgagccgggggccaaagagaaaggaaaccaacacaaaggggacaaaccagaagcggacaaaaaaacgccaaggaaaacaagggaccccccaggagaccgacggcagggcccacagagaaggaaaggagaaagcaaagccaaaagcaagccaacaggggaaagaaccacggcaacacagccgaaagagcccaaaggaaaaaaaggccgaacaacccccagcacaccaaagacagagaggcaacacagacacaacaaacagggacagggggaaacgcaaccgggagagcgaagcacaaaaaacaacagaaaagaacaaacaacaaaaacgcacggggaaaaaacacaagaacagaaaaaaaaacaaaacagcggggcccggggggaccaagcaaggggagacggaaagaaaggccaaaacagaaacgcggagaaagcaacccgggcggggagagcccccccccccccccccgagagccaacgaagcagcaaggcccccccaagggaccggaaggagggggagggggagagagacgagcccaaagcccacagagagagaaaccaacccaacaaaaagaacacacagaaagaacaacaacacaaacacacccacaccccgacacccccacccccacccccccacagcgcacagaacccccagacccagggcaaccgggaagccgggagccccccccagggcagccacaagacagccagaacaacaagcacggaggcccccccccacgcccgcgccccccggcacagcagcaccagagcaaggccgccaaccccccaggccgccgaggggacaagaagcacacgaacagacacgccaaagccccaacaccagaaaaaaccaagccgccccagcacaaacccagccccagcacccacccgcccgacacacccggccccacacgcagcaggagaccagcgcaaaggcgcacggaaccgaaggagcaaaagaccgccaaacaagaggggaaaggaagggggggcaaacaaaaaaaaaaaaacgaaaaaaggcagacaggaaggaggggaagaagcaacgggaggcagcaaaagacacagcaaagacagagacaggagcaaggaaaacaggaagaaacaggcccagggaagccagagcaaagccccaggggggagaggggcgccacacaaagagaggaaaagagaaggacaaggaaggaaaagggagaggaccaagacaaaacgaaccagaaaaacaaaacaggaaagagggaaaccgaacccaccgaaaggggaaggggaagaaggaaccaaacacaaagaaaaaggcaccaggcagccaacgaaagagaaaagaaaccagaagccaggggggcaggccaaaccgccagggaggcagggggcgggggagggagaaaagaaaagaacggagaaccaacccaacaggcgcaagccaaacccaaagggccccagaaagggccaacgagaagagagaggacgaagagaaaagggagagagggccgggcaggccgcagccggccacacgcaacagggggggcaacca

SEQ ID NO: 667 - RNA, 3178 nt, Mus musculus
  misc_feature (2)..(2): n is a, c, g, or u
  misc_feature (8)..(8): n is a, c, g, or u
rnahmsansdrchrcggaccagaaggggaggggcaccaaaccagacagcccaacagagagcagacgccccagaaggcggcgacaccagcaggcaccgccacccacggaaggcgccacaagaacagcgggacgggggcaccgaaacagggagaaaggaaagcaaacagaaagaaagcacagcaagacacgagcgccagacccaccagaagagggcgcagaccaaagaggggagccacgagggagcgggagaaccaggaccggaagagcagccaggcaacgcggagccaccccagcccaaagcaaaaaaaaccaacgaaaggaaaaaccgaggcagaacacggaagcaaccaccaccacacggaccgaacagaagcagaccaccgcaaagggcagaaaccccaagagagccgcccaaagaacccaacggcgcggaacacacggccaggacgcagccacaaccgcagcaggagaagggccaaagaagaagcagcccagaacacaagaaaaggcgcaaggacaggggaaggaccaacaccgaagaacgggagagggggaaaaagcagagagaggcaggggccggaagaacagagaccacacacaggccccgaccagagaaagaaaggcagggccgcgcggaagcggacgggacgaaccaccagacgggcaagaaaaacgcggcacacaggaaggcggcagcaacacgggaccccaagaccacagccagagacagccaaacccagccacaggggggccaagcacaggcccccgggggagaaacggggaggacacgaccggcgcacaggggacgacggcagggcacacgggcaaaaaagccgccagggggagggaaaagcacagaaggccagcaccacgggaagaaggccagccgaagagggcccagacagcaggggacaaaacaaaagcaagaacacccccgccgccgaagccgacaccaaagcacgccaaaccaagagcggcaggagaaaagcaccggggaacggggacaagaccggaaaagaaagagccaggaccgggaaaagcccaaacaaggacacagaaaggcacgacaccagggaaagagaaacacccaaagagaaaagcagccagcggcagaaacagaggaagaaggcaccggcaaaccagcccccccagccggggccagccaccgggacaaagagaacagccaccacgaccgaaaacagggcgggggggggacaggacgcccagaccgcaggcccacagcccaaaaagaaaaggcacgagacgcgcagagcaggacccggaacggagcacagacaggaagcgcgggggcaggaagaacccaggcccggaagagcagccaggcaaacgaagccaccccgcccgccccccccccacaccagaacaaccccaaaaggggcggaacaagagaaaaaaaaaagccggacaaaccaaaggaaggggaccaaaaccaaggccacaaacaaccaccaagggcccgcccacagcaagccccaccgccccaaaagcacacgaacacggaaggagggagggccccccccacgagcgggggagggccccccccacgagcgggggagggccccccccacgagcggaggaaagacccagccaccgcagacccagccagagggagggcccgaccacagagccgggcaccagaaaggaccgaacaaaagggaaagaaaaccgcagagaacaaaacagaacaaacaaaaacagagcgcgccgggcaacacgggacagccggggccggaggaagggccacgggcaagaagccccacacgaccaaccgccaggaacggagcaggccaccgcaccgcggacgacagcccaagagggcgcacagggcaggaagcagccaagccggaaaaagaaaccccaggccccaccccaaaccagggaccaaaggggaacggacgcgaaaagcagccagcgaccgagcggaaggaagagacgagcccgagggagccaggggcaggccgacccgccaagcccggcccaggccagggcacacaaaagaccggccggcaaagcgggccccagccaagccagcagccaggcggggaaccggcacagccacacccggaaaaacccggggacgacggaagggagcagcggcaggggggaaccgaccaccgggccagccgcaagaaccccccacccaggcccccccgcagaccacaggcgccacccggaaggcacggcgggcacgccaccagggcaggcgcaggccgccacgcaaaggcaagacacacgccgaaagcaggcaagaggagccaggccgccccacagcaacaggaacaaacccagaacaccaggaacaagcaacagagcgagggcaagcacccgaaaagacgaaaaacgcagcgaaagcagggcagccgcaaacaaaagaaccacacagacccaggcgccgcgcagaaaccagaaaaccgagcacgaacgggccaacacgaagggcgagaggaaaagggccacgaggcaggcagcacacccgagcccagaccgggcccggccccaccacaggccaagcaacccgcgagaacagggacgacgaaccccaaccccgaccgaaaaaaagcaaaacgagcacaagagccccaacagaggaaaaacccaccaagccacggaacccagcggcacaacacaaggcgccaaaaccaaaggaacagaaaaaagaacccaaagacccgaaaccacacacacacacccaagacagccgacgcaaggagacacgccgggaaagagacaacaaccggacccaccacaccacaaaagggaccagggacggcagcaagggacagcgcccaaaaggccggcccaaagccacccagggaagaagcacgggaggcaagcccacaggcgggaaacaaagcaagaggccaggcgcccagcacccaagcagccaccacagggaagcccccaccacaaggggaccacggggagaaagacaggaccaccgaaggccaacccgaccccagcggaagcgggagaggccccccgcacaggaaaaagcaccaggaaggggggccgcaaacaaagaaggagaaaacagggggggggcgacagacaagaaaaagcacaaaaaaagggccaggagcagaaaggaacccgaaacggaaaacaacagcaaaaaggcaaagcagagcacgaggaaacaagaagcaaacacagagcg

SEQ ID NO: 668 - RNA, 5398 nt, Mus musculus
gcccagggccggacgagcgccccccccagcggcccccaaaacccagccaccggcacacggcccgccccggcgcgcccgggccccggccccccccggcccccacagacgccaggcccccgccaccggaccccagagccgaccggcagccccgcagaaaagaacccaaccccgccaggcagggggggcagccaacccagcacgggaggcagaggcaggcacacgaggaggcagccggcacagaggagcaggacaccagggcacacagagaaacccacgaaaaaccagaagaagaaagaagaagaagagaagaagaggaaggaggaggaggaggagaaagaagaagaaagaaggaggaggagaaagaagaagaaagaagaaagaagaaagaaggaggaggaggagaaagaagaagaaagaagaaagaaggaggaggagggaaaggggaaggagaaggagaaggagaaggagaaggagaaggagaaggagaaggagaaggagaagaagaagaagaagaagaagaagaagaagaagaagaagaagaagaagaagaagaagaagaagaggaagaagaagaagcggacccccccaagccacaccgcccgggcaggaacccgggcgacagggcaggccggggcgccacagccgagcacgcacagccgccacggaaaacacacccccagcccgcacccgacgcgaccgccccggccagaccggccggggggagggaggggagacacacaaagaccaagccaaagccaccccaagagcaagacccgacaggcaaccagaggccaaccccgagcggacccaaaacagcccagggggaccccccaaccaaaaaccagcacccaaacgcaagcacacaaaagaagaaaaccccagaggcaggaaccgaaaaggacccagccaaaaggagaaacacgccaacgaggcaagaaccggacaggggaaaagaaacaacaaccaagaggcacggaaggccccaagacagagccacgaccaaaaacgggaccacagacaggacgcacagagcaaacagcgggggggaccggcacaaggagcggggagcccgcgaacaacaggcaagcgcaaaaaacccaagaagacgaagagagagagggagagagagagagaccggcagcccaggcggccccaccccaaaaagggggcacccgcaacaccgcgaggacaaacaggaccagcccgacaaacagcgccacggggagaacccaggacccagcagcgccagaagcgccgagcccaccacacaaaaccaagcgagcgaggagaagaaaaaccccaaacgcaggccgaaccacgaaagggcagggaaccaaaccagaccaccccagccccaggagcacccccgcacacggaaaaccgccccgaaccaccgaggggcccggcacccggggcccacacaggccaagagagcccgaggaacgagccaagccacacacacacacaaaaccaagaaacgaaagcgccaggcaggaaccgagcaggcgccagcagcaaacgagcgcccgcgggaacaaaacgggggcccggaagggggagggcagaccgcaggaaacggaaaaagaggacaggacgcaacacagggccgcagagggggcggagccacgaggggggggccgagcggagggcgggacgggggcggagcaaaagagggggcccgaagggcagagcccgggcggagggggcaggagggcgcaagggccaaggaggcgcgcacgaaggacagaagacgaagaggagggcgcgaggccggcgccgggcgcggcccaggcacccgggcgcccgagccagggagcgaaggccgagcaacggggagaagcgggcgcaggagcgagccagcgcccaccccgacgcccgcccaaggccgcccagccgggacgacccgggcccgagccgggaggcggggggggagaccagagagcagcagaaaggcccagcccaggcgggcccgggaacggaggaggagagagagacacccaacagcgagcaggcaacaaaacaaaacaaaaagccagggaaccacgggcaaacacgggagaaggcgacgccaaggggagagacaagagagacccaaggagaaaacaaacaaacaaacaacaacaaaaaaccaaaaaagacagcccggcacccagccagaacccggagaaagccgacccccagggaggaaggagccccaggccacccgaagaggcacacggggaacagcagcagcggacacagcccaggggggcggaaccgcggaaagagcagccaggggaaaagagagcagcagaaaaaacaagagcaggggacagagaaaaacaggagcaaagagacggccacgggcgcgcccagaggacgcgggcgcgggcaaccagggcaggcccagccccaagcgcagcccaaacagccccggcgcgggaggccaaccaagaaagcgcaccaaacgaagcacgagaacaaacaggcaacccaggaaagggaggagacccacacaggcgagaacccggccacagcccaaccacccaggaaaacgaccgacccgcacgaaaacacacacacacacacacacacacacacacacacgcaaaaaaaacaaaaagaccaaaagggggcacccgccgcaaccaacacgaggaagaggaaagcggccaggagcaccaacccggcggggaggagcgcccggaacacaaaagagcgaagggaggccaggggcgcgcgaaggacgaaaccagcagaggagaacaaaacgcagccagaacagagccagcaaaggaaaacaagaaccagccagaacaaacaccagcaaagggaaaccaaaccagccagaacgaacaccagcaaaaagcgaaacagaaacagcccgcagcacaccaacaggagggaagcgcagcacgaaagacgaagcgccaccacacgacagccagcggcagcagaagaagcccccagagcagccagaggagagagcgggcagcaacggggcgggggggcccaggggccgcggccggcagcgaacagcgcacccggaggggggcagaggcaggcgcccccagcacacaagagacagagcccaacgaaccggagcgaaacagcgaacgggccaggaagccaggaccccgcccaccccagccggggcggggacagacagccggcaaggaaggaccccagaccgacacacacgacgagccacccagacgcgggaaaaacggcgccagggccacccaaaccgaaacgggaccacccccaacccaacagggcgggaaagcaaggggggaaacagaacagacgcccccaggggggaaaggcggcccaccgccacaggcccaaaaaaaaacaccaaagacgcccaacaacaaaaacacagagacacagaaaccaaccccacagggcccaccaccccgaccagcacagacagacacagcacagacagacacagcaccaccccccccccccccccccccccgccaagacagggccggagccggcgccggaaccaccaagaccaggcggcccgaaccagaaacaccgcccgcccccaaggcgcgggaaaaggcagcaccaccacgcccagccacccagagagaaaagcccagcacgcgcccaaagccgcaagaaggcaaagaagccacggcacaggaaaaaaaggaaccaacggacagaacaaaggaaggcagccaaaggcaaccccccgcgcccaaacccgggagcaggaccgaaagcggcacggcccccaacacacggaacaaaaaaccaaggacaaccaaaaacagccagaagaacccagaaccccacacgaaacaaagaccagcagaagagacagcccacgcagccggggaaaccgcaggccccaaaccagcacggcaggggcaacccaccccaagccgcaacaggcgggggccgggccacccacggggcgcccccggagggaaggcccgaaggacccaaggggcgcagcccaaggacggcccccggaaccaacaccaagagaagccacagcacgaccggggccaggcaagagagaccgagaggcagccagcacccaccagcgccagccacaggcccccggccccaggagcccacccaacaggaaacgccgggaaggccccgcccaccgggaacccaggccaagcggacaagagcccccagggcgccaaaaccagggcaccacagccccaaggccgaaaaaaagaaaaagaaaaagccaggcaaaagccggcgcgaagcgaaccagaaaccagacaagcgcagggcagccccccaggcagcaaccaaccagaacaccaggggaacccccagccgaccaccccagaacccccccgcggaacccaaccccccccgccaaccaacaagcaacagcaggcaggcgagcccaaccagcacaagagaccgacagaagaagaaaccacaggacaaaaacccagaacgaaaaggggaaggaggaggggcacaagacagaaaggagaaggggacccaacaccaaagaaaggcaacaccacggaagacgcgaacagagccacgcaccacaaccggaaggaggcagaacaaacgaccagcacggcaagcgaaggccggagcagccgcccaagcccccggccgagggcagagggccgagcccacccaggaggaagaagcgcaacaggcccgcgaaggccacgcgagagccggaaggcaaccacacaaggcacgagaacaaggcaaaaaaaaaggccaaacaacaaaaaacccagaaagcaaagacggccaggaaagaggccacccaaaaagaaaaaaccaaacaaccagagcaaaaaaaaaaaaaagggcaaagcagggcgccagccagacaccagagggccagacacagcccacccacagagccgagagcgcaccgcgcagccagcccgcacaaagacaaaaaacgacacaaaaaaccagcgccaggccgaggggagaagaccggaaccccgagaaggagacgccggcacagaaacaggacacaaagggagcagccacgggcgccccaggggcaagggacccaacagaaacaagcagagggcgaggcgccacacaaacccaacagggaagcagggccgaaggaaaccagcaccaccaagcgaaccgccaaaagagacgagcaacggaggcccaaagcacccaccgagccgacagagacagagacccagaaaccacgggaaaaaagaaccaacccagcaaggcccggccccgcccagcaccgacaaggcacacaagaacacaaaaacgaaaaaacagaaagagacagccaccagccacgccggaggccaaccaagaaacaaagcacgaacccaagccgagccgggaaaaaacccagaaggcccccaggcccaagccccacaagcaccaaccacggaagacagagacacgcgcacacagacgagac

SEQ ID NO: 669 - RNA, 2743 nt, Mus musculus
cacccaggggaggcgcgaagccgaccccaaggaggggagcagggaacacccgagcggggcgcagacgagccggccagcgcagcacgcccgcggcaagaaccgggcagaggacacaagaaacaaaagcaggccccgaccggacgcacgcacacggcagggcagcgagaaggagacaggcggcagcccagagcaacaggagcgaaagcagacccggccacccaccccaagcaccaacacaggcaggggagcgcagaccagcagagaggagccagccacccgcagcacaacagccaaccggggcccaccccagcgagcgaagacccgcacggggccgaagacaacacagaagcaagacgagagagcaaaagcagaagaagagcaacgaaaaaacgggcggggggcagcacaacagaggaacgacaggggcacagccgggaagggagaacaacgccaggaccggggcagcacaccgacccccgcccacgagggccccccccggaggcccccacacgagaaagccagacggaggacaacgcacagcagccaccccgggggggccggcccagggccgaccccacccaggccggcggggcacaagccccaagaaagcaggaaaagcaaaccaaccccgggacgagacgaggcaaggcagcacacccagaacagagaaacggcaggaggggcgaacggagagacggcaggaggggcgaacggagccaagcgagccaacagaggcggaaacagcaagcacacacgcgaccaggaacggaagaaaaaaagaaaagcgcagagacaaaccacaaagaaggaaaaaacacagaaaacaacaggagaaccaaaaccccaacagacacacacacacacacaaaaaagacaggaagggcaagcaacgacaacaaacaaacgagcacgagaaggcagggccccaaaaagcaaaaaacagacagcaaccacaaaggcaggccccagccgcgaaggcacccggggcagaaggccggggcgaaggccaagggaaaccacggagcaaggaagaccccagagcgcgcagcgggcaacggaaccgacccggggcagaaaggcaccaaggcgccgggcggggaagacccagggcgaacacacaaagaacgcccggcccacagacgaacccaaaagagagcgcgcggagaagccagcaacgaaacggagagccgggaccggagcccagaaagccaggcgaaccaacacaaggaggagaagcacccacacaaagaagcgggaagaagcacagggccggagagcaacagcggaccccgagccaccccaccacggcgagcaggcacagagcccaccgcaccgagagaagaaagagcccgagcaaggaggaaggcccagaaagccagaagaccccgaagcaggcagccagacgaggaggaaacgcccaaaccagggcgagggcaaagaggcggagaggagaaggcaacccagaggaaaggggcaccgcgaaccagaggacacgaaacaaggccaacgcagcaagcaacaagcaggaaggccggcacgggcaccacgacacaaaaggcacaaagcgcgaggaggcagccagcagcagcggcgggaggccagaggacaacaaggcacaccgacaccacgccgcaagacaaaaacccgggccgaaaccgcccaagaaggccaggacagaacagaacccagggacgccaaccgccccgaccgggcagacaccaggaagggcggacagggcagaaccaggcccagaccagaggagggccacgacgagccacgccagcccagccgagacacgcagaagaaaagacggacccaccgcagacagaagagggagaaacaaaagaaaaaaaacccggagagggcgagccgcgccgaaacgcagacagcggccggaaccagggacgccgcccgccccgaggcaagaaaaaggcacgaccagcccgcgaaaagaaaacccccacaagacaggacaaagggcaccccacagaaaacccccaggagccaggggccgaaccacggcgcagacaaacccaaagccagcacaaagaaacgggcacgggcgaaacacgccccgcccagaaccacagccgaagagcaccagcacgaccaggaaggacgccaaagccgcgaccgcccgggggggggcggggcaggggaggcgaggaggacacagaagcccaagccccaccagcacgagccgcagccacagcacacgcagaacaggccccgagcagcgggggcagcagggaccacagacaccaaaacacccaagccaacgacagagaacacggcaacgagacgaagacgcccgagcacacgccgccgccgcagcgccacccgcccccgcgaaagcggggcagccaggcgaggaacaccccagccacagccgagcccgacgacacccggaaggggccccaggcacggccaaggagaagcccgaaggggcggaaacaccacgacaaacgaaaaggagaagaagaagccccgggaccccccccacgcaagagaacagggcaagaaccccgaagccaaggaccaagccggggaagacaacggagacgggaggaaaaagacgagcagagaccaaggccagcacaccacgccagaacggcgggaggcacgaaggcccagaaggacgaagcggcccccacgcaccaggcagaggacaaggcagcgacccgcgaacagagcgacgggaccacagcccaccccccccagaagcagcaggagacgagggcag

SEQ ID NO: 670 - RNA, 14396 nt, Mus musculus
gagcacaccacagaagacagagccagaaccacaagagaccccagcagacacgagggaagggggagcaccggccccagcacggaacgcccacaacggaccaaaaagcccgggcaagcacgaacccccacaagccggggaagaaacgccaacgaagggggaacccacgccccgggaaaaaaaggagaggaccagggcagcggcccaaacgagaaggaggcggccagggaccaaagagccgagcaaaacaaaagggcacgggacacagaggccccaggcaaggcgggaaaaccagcccgaaaccagccaccgaaaccgccggccccgcccccaccccagaccccgccaaaaccaaccgaagcggcgcacaaaaccggaccgaaaccccaagggaggagaaacgcagcacaagccagcaagacacaccaggcaaggggcaacacggaaggccaaggacgaggaagaagaccccaggcccagagaacaccaccccgcccgggacaccacccggccaacaaaggaggacgaccccaccccaccaacaccacaggggaggacacgcacacggaacaacaccagaaacagccgggggaggggaggggcaacgagacaagaaagagaaagcagcgaaaccagagacacgccaagcccagccaacacaaccgcccacagccaccaggcgagggcaccccacgggggggaggcaccccaaacagggcgaaggagcaaagggagacagggccgaagcggcgccggaaccacgagaccaggcggccgaaccagaaaccgccgcccgcccccgaggcgggaacagaccagggggcccaaacggagagaccccgcccaccggcgggacgaaggccagccacaggccggcccccacacaaggaaggccacagagggaagaacagccaagagcagagcaacaccaaaccagaagccggagacgaagaggaccaagagcacggcgagaggaaagacggccaaaacacccagcacaacaagcacaggcagaaaagccaaaccccgaccggcaaaggacaggaagcagggacaaccaaaaaaaccacgcgaaccggagacaaggaagagcagacacaaaaaccaggaagagacccaggccacgcggcacagaagggagaccagcccagaaggccagccaggagagggcgacccgggcccagccccccccgaacagaagcagaccagggaagcaccaacagaccaagaccccaccccccagcaccgcaaaacagcaccaggcaacggagcacgcaaggccccggcgccccccaccaacgggcgggggccgcacacgaccccaaggccagggagaagcagggggcggggcagccaagagcgaccacgggacgcccgacccgcgacggaggcccagaaccacacccccccccccccccacccccacccccaccccaggccagccccacggaaggcccaaggagaacgacagcaaagccgcgaggccaacaacccagggaggagacacgacgccgacggaaacgagcaccaccgccgcgcggcccagaaaccccggaaaacacgagccacgcgcgaccgagccaagccccggcaccgcgcaaaaaacagccgcaacaacagccccgaccccccccccccccccccccccccccccgggagcaggggaggcaaaaggaggggaacaggaaccaacagccaaggcaccagcaagcacagcagcagcccggcccaaccaagcacacacagggcagggcccccccccacgcccaagcgaccaggaaagcaagaaaacagcacgcaagaagcaaaaccaccgccaccacacccacaggggaagcccaaaggacagccgggaaaccgcccggacccgcccgcagaagcagcagcaaccaaacccaacagacagagcaaaagacggagccaccgggaaacagcaagaaaaaaagagcagagcccagagaagggacagaaggggaccaaaaggagcaggcaaagccagaggggaaaaaggagaaaccagcggaaaaacaaacacaaacccccccccaagcccccaaaaccaccccgcacaaacaagccccaaaggagaggacagaggaaaaagcaccaacgaggaaacaaagccggacaagagcacaagaaagaagaaaacagccaggcagagaaaagagaagccaaggagacgagagaaagaggaaaaccaacggcccaaccgcagaagcggcccggagaaggcccagacccccccacacggcaccgagacacagacccacgggccagggagggcaaccgggcagaggagcaacaacacgcagaaggcaagacaaaaaaacaggaggccaagccggaaccaagaagcaaagagcagcaaaggaacacaacgacagccacagacccaggacacggaaaagaacacaaaaaagaaaaagaacagagaggcccgcagagacgcgcaagccgcagaggcagaagagggagcagaccaagggacaggggagcgccaccgggcgggaacgaaccggccggaagagggcaggccaacgaagcacccaaccacgggccccccagaaaaacccagcaaaaagagaaaccacccgccggacccgggaacaagccggggagagccgaccccaaccagacgggagacaacacagggcgccagcagagacgggcgaggagccgcagccaccccggcaaggaacaccagaaaacaaaggccaagggacagagagagggcacagagccaccaggaacaaacgagacaaacgcacgaacgagggccaaaaggcaaccacaagaaggagcaaagaggcgggcaagcgcaaaaggagaaggcggggagacgcagaccaagcccagaggccaggagggacagagccagcaagagaacagggcacacagaagaccaacgacagcaccagaggccccagagcagaacgccacccaggggcaagccagagacaaggagagaggagcaggcagccgacgggagacagaaagcccgcggaccaagaaggaagagcagggagcagaacgcccagaggaaaaaacaaaaaaaaaaaaagagaggaagagagagagagagagaggacaccaggcaggacccaacccgcccgcaagcaaacaacgaagcaccgaagaaacagccaccagaaccaagcaaggaccccaaggaagcaaccccagaaaccacggggaagaaaaggcgaagccagggccgcaggagacaagcggccagggaaaccacacagcgcaggagcagacgcgcaggagggacccacaagaaaccggggcagggaggggaaccacagcgagggcgcgagcggcacgcgcgcccggaaacaagcagccggcgcacgaagaggagcaggggcccgggcccggaaccccccccaggcccaagagcaacgcccccccccccgcaaaagcacggaaggggagggaacagccagcgagaacgcaaaggccaaagacaaaaccggcaacagacaccagcccgccagaagcacaaaagagggcagggcaaggaaagcccacgcccgacacacgagaaggccaggccacgcacaaaggcggcgccgcgacacagagcagcgacaggcccaggccacgggggagcaccgaggcaggggcacccgggaagccgagggcagcgggaccagaagagcccagaagcagggcggaccaggaggggccggaacaccagaaccggacacgccgagccaggggcacccagcagcccagcgccgccccaccccgagggaagcaaaacgaggaagcaacacgcccgagggcacacggacgggagcacaccaagaacccagaccgaaaaaaaccagccagaagcaaacacaaaagaaggaagaaaaacgacaaaccaggaaaaaaacacaacaaaccacgagaaccacagcaagaaggcagcacacaccccgaaagagcaggcagcacaacaaaacccagagcgggaggcagagaggcagggaggcagagaggcaggggcaggggcaggggcaggggcaggggcaggggcaaacgggcagacaaagaggccacccggcacgagcaagccaggcagccaaggcacagggaaaccagccagagacaaaaaaacaaacaaaacaaaagaacaacaaaacaaacaacaaccccaaacgaacgaccccccgagcccggggggcacggcccagggggaaagggcacagcagaccaaggccgggagacagagcggcccaacccacgcaccaacacagcgcagccacaggagccagcgcgcacccgaccccagcaccccaggcccagcaccaagcccacagagccccccccagcccaacccagccgggcccagcagaaggcagccacgaggagcggcgcccgggcccccgcggagaagccggaggcagccaagcccaggccagcccgcgggccgccaggaaaggcccaggagagcccaggccggcgccagggaggaaccagacagcgcgccgcccagccagccgggcagcccaccccccagaccaaagcaaagcgaccccccgcgccgcacgcgccgcccccaacacaggcgcaggcacccgggagcggggaccaagcacaggccggccgacagcaagagcccgaagccagaacccaagaaaaggaaccgaaacgaggaaagaaagaggaaggccagaaggaagccgcacagaaggcccaacggcaggggacaagcgcaaagggcaacggacagaagcccaaggcgcacggaaggaaggccagagcgccagcagggaggcagagaccgaagagaggaaagaaggggggaaagggaggagaagacccgagacggccaccagcccccccccgccccccccccccccccccccgaccaccagaggacagaaggccccgaagccacaccaggcaccagccagaaggcccaaagcaacagcaccaaccaaggaccacagacgaagaaaacaagcaaacaaagccccccccgaaagagcaagagagaaaagaaaaacaaagaacgaacaaaaaccaagagagaagaacacacacccccgaccccaacccccggagagcccccaccaaaaccaaaacccaacaacaaaaaaaaaagaacaaaaaaagagaaaaaagggaaaaaacaacaacaagaacagcagagaggcaagcaagcgaaaaacaacaccaaaaaacaaaaacccaaaaaaacgagaaaaaaaaaacgcaagaaaagaacaaaaaaagcgagagagagcaaaacggccacgggacaaacacaaaaaagaacagggaagaagcagaaaaggcgacgaagccccacacaccaaaacaaccccaagagcaagcaagaggacagcgcgggcaaggaagaagaggcagaggaacagaccgcacagcaaagcacacgggagcacaccagccgcagggaacaggacacaaagaaagggggaaagaggcaccagaagcacacaacgcaagaacaaggcgcagagggggcacagacaaaggagggaagacggcaggcggagagaaacgcacaccagagaagagaacaaaagcccccaaaagaacaaaagaaaacaagcaaagcccgccacgacgccacaagccgcccccaaaaaagcacacgggaaaacaagaaaagaagcgcgaaaaccaaaaagagaaaacacaaaaaacaaccacaaaagagagacgagaaggagaagcagacaagaccaagggcacagagcaagacccgcaaacaaacaagcagaaaggaaggagacaaaggaccaccccaaccaaaagagagaccagggaaacaaccgacaaacaacccaagaacaacaaaggaagggaaaaacaaaagcgaaaagaaaaaggagacccgaacgagaggggaaaggggggggaaagaaccgcccaggggagcccccgggagccacaaccgagggcggagggaaagaaggaaagggcaggaaacggcccccagaaagagaggcgggaagagcgggcggcaggccaggcaagagacgcccaggaccagccaagccggggagaagccgggaacgaaggggccaagacgacccccacgcaaaccgaggcaggggacaaggaagggaggaaccggcgagcaagagcgaggccgaggcagggcacccaggcgggaagccaaaggaagaaacggcccaaggggaaccaccccaaccaacaggcacccaggccggaccggaggggaggagcgcggccacgggcaagcgggaccgcaccgagaccccaccagacggggagcgcacagacccacccaggcaaccaggggccccgaaagcaccgagaccgaagggccccgcggaggccgaaccaagggagacccaaggaccagcgaccggcccgacaagggaaagcaaagcccacaaacagagaaggaagacgaacaccggggggggaccaggacgcagggggagaagggcgagagccaggaaccggcggccgcacacgccccgggagccgagaccgggggccaaagccgggagcaagcgccgggacccgaccggggaccaagcccgggaccgggaccagaccgggggagagcaccgggagggagcgcccgggggggggcggcgggaggcacccaaggcgccagggcacggcccagacaaacagaaggaaccggccacggcggggagccgaggccgggcccaacggcccagcccgggggggacagagggccccacccgacccaacccaaggacagggagcaagaagaaaaggcaaaaccacaacccaaaaaagagcagcacgggaaaaaggaaaagggaaaagaggagagaaagaaaggagaagaaaaaaagacggaccccaacacaccaaaggaggcagcaaaggcaggagggagagccaaagacccaagacacacccggggaaaaagccgcccccaaggacaacaaccagcaacccccaaccaccagcagcaacacagaagaagagagagaaaagagaaaaaaagccacagaaggggggcacaagacaggaaggcaaggccggaggacccgggggagaggacacaagccagaacaaccacacagaagacagaagacagacagacagacagacagacacacaacacacacacacacacacacacacacacacacacacacaaagaagggagaacccaagcccaaacagacaccagagacacccacccgcgggacaaccagcccccaccgccccgcagacagcgcccgccagccgagcaaagaaacagggaccagcacagcgccaagcccacccccgggacagccggcgcccaccaaaaccaaaaagccgggggaaggggcccccggggcagccaaaaaaaaaggacggaaagaaagaggacaaaaagagaggagggagagggagagggagagggagagggagagggagagggagagggagagggagagggagagggagagggagagggagagggagagggagagggagagggagagggagagggagagggagagggagagggaggagacaggcaggcaggcagaaagccaacagaggcaagggggcaggagggaggcaccagagaaagagaaggaagcgccggccaggagaagccaagaggcggggcgaaagaaaaggacacaagagaaaaagagcagcagcccgaggaggaacagagaaagggagggcacggccagagggagcgaagcacacgggaaggggcggaggccaaggcaggcccaaggggaaacacgccccccccagcaggccgggagcagcccgggcgggaagccggcaagccaagagagacaagcccagcggaaaccgaaaagaagagagaagggaaaggagcaggggaagcaggcacaccaaggcgaggcagaagagaagacccacaggaggaagagcgccacagagccccgacccccaagcagaaaccaacaggaagcacgccccaggcacaagggaggacacccaggaccccagccacccgcggggccgcacccccacgccgcccacgaccaaccagcaagagaaccgggcgagaccaagaaccccaggccccagagcaagagaaaccaacaaaagaccaacggaacagaaaaaagaaaagaaaaaaagaaaagaaagaaaacaaaaacagaacccaggacagaagaaagaaaaaaaaaaacaaaacaaaagaaaccaagcccggagaggcagaggggggcgccggacacggagaaccgggcaccaacaagagagaaaggaagaaaacaagaaagagaaaacaaagagaaggaaggccggagaccaaacaaggggcgcaaggcggagggggaagaaaggcaagcccacagcaccgaagaaccagccccaccaggacgaagaaggcaggggcagagaaggaggaccggagaacaaaaacggacaccaagaaaggacaaacaaacccaggggcaaaaagcgaagaccagcagcaagacgaaagaaaagcagacacaacaaagaaagggccacagcaaacaaggcagggagagcgccagacaaaggcgaacccgggaagccacaaccaggggaagcagaaagccagaggacgggcggggggggggggggggggagaaaggggagggagaaccaggggggagggggagaaagagagaacgcacgcagccaggggaagaaaagccaccaccaggcaccaggaagcaggaaccggacgcccagcagcccagaggcaggaccaaaccccacaaagacgaaagagaaacggaaggaggggcaacccgggaaggagacagacaaaaaacaggggaccagggcaggcgaaagaaagaggcagcacagcggcacaaggccgccaaccgacgaagcagaggagaaaagaggaagggcaaccggagcacgccaccacgagagacgcagggcaggaacaaagcaggaaccgaaccaaaacccacagagggagcgcaccacccccccccccccgcccccacccccccccccccgcgccgccacagcccaaagcccaggcccacgcccagggagggcaggggccggaaggggcgggccaccggcgcggcccccggagcccagcacagcggaagacagggaaccccaagagaacggaaaaaaccgggggggccagccagcaaacaccaacagccaacagcgaaaaagcaacccgggcaaggggcagagcaagcagcaacgacagggaggaagaaagaaaacaggaaggaggccgaagaaggaaaagacagggaaggagaaaaggccccgggagcgggagaggaaggcagcgggggcgccccccagcacgacccgagcgaggagagaacagggagcaaagaacacagcacaaaacagaaagcaacggccagagccagaaccacggcaaacacaaaccgggagggggccacggcgcgaccagcggcggagggcacgaacgggagggaaccggggacgcgccccagccacaggggagcgagcacaccgaagagcagggggacgagcggaagcagagcagcccagcggcaccgcggagcgcgcaggaagcggggagacaaccccacacagcgcgcagaagaagggaggaggaaagcaaagaaggagaccggaagaaaaagaaacaaagaaaagcaaaaggcacagagcagaaaggggggagaagggggccggaaaccgaacccagcgggacgccccaagggggacgcccgggcggcagggaaaggagagggacaacaagaaaccagcacacaccccagccggggagaaggggggaacagcacccgaaagcaaggcaccacaaaggaaagaaagaaagaaagaaagaaagaaagaaaggaaggaaggaaggaagaagggaggggaagaaaggaaaggaagggaagcacaagcacaggccaagaccggagaccccagcacggaggagaggggagaacccaccagagccccgcaccacgcggaggcagagagaaacaggcaaacagggccaaaagaaagaggcaaggagccagcccggcaggcaggaaggacgagaaagaaacgaaccgggggaacccgccgcgcggaagggcgcggacaagagccagagccaagcgcgcgggaggcggggcgcccgccgagaagaggacggaaggcacccgggcagcagacggagagcccagccagccaagagaccaaacgcggagggacagggagaggagacagccccaggaagacagaggagaggaagagaagagaaccccaacccgaacgacagacagcgggcccacaggggacaggcaccacccccagcgccacaggcgccggcagcccagccaagcgcaacgacaaggaaaccaggcgacaggaaacccagcaggagcacagagcggcgggccggaaaccacacaaagaggcagagaacgcgagagagccgcagaaaccgggcccaaaccaaccaccaggcagcacccaccgggagagggcaggagacccagggagcaaggaccgcccccaagaccgaggcgaaaaagaaagaaccaagccaaagcgggcagaagagacaaggcgaagagggcccaggggcccagaggagaaccacaagggggaaaaagaaggggagagagaagaccagggcaaggaacaaaaaagaccaggggggcacggagaagagcacccaaacaaaacaggcaaaaaaagggaaggcgggaaaagacaaaaaaagaggaagaaccccagccgggagaggaaaaaaaaaggggcagccaggaacagaggcaaagggaggagaaaccccagaagagaaaaacacaacaccaaaggaaccaagaagacggggagcagagcgggggaaaaccgcaaccagagaggcagagaaagcacccaggaccaccccagcaagccagccagaagaaagcccccccacaccccaaaaaccccaaaaagcccccccaccggcacccaccgccccgaccccgacacaaaaccgcaccgcaaaggggccacccgaccagggacgaccgcacaaacaagcagaaagcccagaaaagggggcaaggcgagccacaccacacaaccacaggccccagaaaaaacaaccagagcacagggacaaaaccgcaacagagaacgcagaccaggagccggaacgcaggcgggaaggacgaacaaccaccccgcaccacccaaacgagcagaaaaacggccggccccagcccacccccccccccccccccccccaccccccccccccccccccccccccaaggcaggggaaggaggaggagagcacaccacacaagagacccgcccaaggaaaacaagagcaaaacaaaacaagaaaccagggcagcaggggcaaacacaaaaccaagacagggagacggaagcagggggacacaaagaaagccagaagggaggcgcagagacgccaaaagaaaaagaaaaacaaaaagagagagaaagcaaacacaggcaaggagaaaaaagccacaaaggagagagaaaggaaaaaaaccgggaacacagaaaacaggggcaggccccacagcgcacccacacaaaggggaagggcaccgcacacccacacaccgggaagccagaaaacaccacgcacagggagccagaaaacaccagacgggaccagccaacgaacaccacacccacgcacaggcacggcgacaccacgcgagagaaaagaggggcaaagcgggcagagcagccaaaaagggaggagcccaccagaagggaacaccaaggcgcacacgggccagggcacacccgggggcggaagaggagaagagggcccagaggcgaagagacacccgccagcaaagcgcaggacaaagaccaggacaaggaagagggaggccggcccgcgggacagagacacgaaaggacaaagcaggccggggggccggggcaccacggggaacaaaaaggggccggggaaggagggggagggaggaagcccacgccgccggagccaccgagccggacaggcagacgcaggagggcgccagacgcccaaagccccaggggaaccaagcccgacccacgacggggggggacaaggggcagcccccgaaagcaaaagggacccccagggaacccgagccccggggagagagagaggacaagggaagagaggccacacaggcaagagcgcgcagcgagcagagacagagagcagagaaagcagggggaaagagagaagggagagagagaccggaggagaaagggagagagagagagagagagagggagagagagagagagaggaaggaaaggcagagagaaagagagaagggggagaggagaggagagaagagcaagagaacaaaggaggagagagcaaggaggggcaaacagcccccaggggggcaccgcagggaggcgagccgaaggcagaagcgggacagccaggaccaaccagcccgggaggcgggggggcagaacaggcaggagcagagccaggagcagagagaaccccgcccagaggaaaacacacgggccaggggcaaaccagccgacggaagccagccgcggaaacccaagcccacaccaccagcggacggggggggccagcaaccaaccgccaaggccagcaacaggcagagccaacgggaagagcccagcgggggacagaggagccagaagcgcagcgggcaagaaggaaccgaagaggaggaacgaagccgcacccagaggagacagaggagccgcacgagagggggacggagcccagggccaggaccacaacgcacagagggccacacagaacccaaacacagcccccaaacagaacagcagcaaaacgaccgagggaacaaggccagaaaccagcgacggaagacaacgagaaaagaaggagcaggaaacggagccaaaggaagaagagagggccggggaaacacagaccaaagagccggaggccagagccgcacagccagacggacaaacagggacccgccggccccaaaagcagaagcggcgaccagagaagagaaacaaccgaggcagagaggaccgcgaaagggagggggacaaaaagacacaggaggcgcaagggccaaccaggacagggcgggaaaggaggcaagggagaaaacaaacaaacaaacaccaaaaaaaaaacagcgggaccagggcggagagaggccagggaagagcacgacaccccagaggccgagcaacccagcaaccacaggggcgcaacgggaagggacgagcccccggcagcgaagacagcacaggaccacacgaagaggagaagaaaaagggagaagaaaaaaaaaaaaccaaaaaaaaagagaccaaggaagagaggccgaacaagagacggcgcccaagaggaccaggcgagccagcacacaggggccacagcgcaaccagcccaggggcggcagcccgcaaccagcacaccgggcacagacaaccgcaggcaaagcacccacaagaaaacaaaacaaaaaccgagcccagaagcacaacgcccaagccccagcgggagcaggggcggagccggccccacccccaggcggaccagagcccacgacccagccccgcacaggggacgaccaccgagacggaacccccaccagccaagggagcaagaaggagccagcgcacagccacaacggcacagggcagaagaggcaaacggaggaacgaagaaaggccaacagcgggagaacccagagccccgcagccggccggacgggacacaggcagcaggcgaccggaacgcacaccccaggggcccaagacacgagccaaaacgggaaacaggcggcccaccaaccggccccgccgacagcagcaagaaagggaacccacacccaacccacgccaccaacagcaggaaaccaagagggcacacaaaaggacaagccaaagaggccgcccggaagacccacccagagggggcaggagggggaaagcccacagaaccaggggcaagggccaaaacaagacgaagaggaaggaacgagagaggcccagggcacggccccaggggcagcagccggggccggaggccaaaaggccgccagggacagaggaaaagcagaaaaagcaagaggaaagggagggccagggcgacccgaaggagcacaggagcagggaaccaggcgggggagaaaaagccggcccggaaacccagaccaccagaaaggaaaaaaaaacacagcagcaaagcaaaagaccagccgcggaaaacggaagaggcaaccagcaggccagccgggaggccagccccaaacagaaaagaaaaaacgccccccaggcggccaggcgccacaaaaaaagagcaacagaagaaccgaacaacagcggacaacggccaagccccccaaaccgccccccacacgcccacaggaacccacagaggcagccaggccaggaggaaccccgcgccagcaaggcccaaagcgccccccacccaacacaacgggcca

SEQ ID NO: 671 - RNA, 692 nt, Mus musculus
  misc_feature (63)..(162): n is a, c, g, or u
aaaagggggccagacccacggggggggggggcgggagggagcgggaggggagggcggggaggnnnnnnnnnnnnnnnnnnnnnnnnnnnnnnnnnnnnnnnnnnnnnnnnnnnnnnnnnnnnnnnnnnnnnnnnnnnnnnnnnnnnnnnnnnnnnnnnnnnncacaagagcacaaacacaaaccccaagaaacgggagggacagcacacacggacggccaaggccgcaggaaggggccggaaggcacgaaccaacagcgccggggcccgaggacccccagacaccgggggaccccaggaggcgagggcaacacaaagcacacgccaagagaaccccaccgggcaaaacgcccaaaagaagagccgggcccggccggagacccgcgagccagcaaaaaggccgcaccacagccccagacaagcgagaagccgcccagcaggccccacagggccaagaggcggaaagaggggacaagacaggagccagagccgacgccgaaaccacccgagacaggcggccggaacagggacaccgccgccccaaggcgagaaaaggaggcaccagacccagagcccccaaacgacggcaaggagacgcagagcagcacacacagccggacgaggacgccagaagaaagggagaaccccaaacggagacagggggagcccaagggggcggcaaacaaacgaggc

SEQ ID NO: 672 - RNA, 7114 nt, Mus musculus
gcaggacaggcaacagcagcggggagaagggacgccgggcaccgaggcgccaagggccggcgagagaagcgcgggcaagagggcagcaaccagagagaagcaaacagaccaagaagaacggaacacggaggggcccagagccacccaagcggacacaaagagaagaagaccgaggggagagagcgaggccaggcggaccacagaagcagcaagagcagcgagcccaggccggccaagacgcccacaccggaggcggggaaagcagaggggagcaggggcagaagcaggagccccaagcacacccccgaagagagggcacccagggcacagcaagacagaaacgagggagaaacagaagggggggcagcaagacgcgcccaggaaagccgggagaccgacccacaaggcagaaaagggcaccgcacaccagcccaagaaaggaaccaaagcgagcccgagggaagaggaggagaagggggagggaccggcccgggcaaagcaagcgcccaggagaccgaacccaggaagcgagaggggcaggccaggcagcccagcccggcacccaccagacaaggagggcagagggagaggcgacaccagccgggggacacgccgacccccaggcccaccacggagaaggcgccgagagcacaaggggagcgaagggagagggagaggagaggcaacagcaacacgggaaaaaaacacaaacccaaaacgcaagagccacgccaccagaccccggaggccaccgcaaaaccaggaaggcgcgaacggggaggccgaaccaacgccgggaggcgaagcaggaggagaaagcaagaccccgggcaaggggaagagagccagccgggcaaaggagacaaccccaaaaaaaaaagaaaaaagagcgggaagaagaagacagagcgcggcacacaggagcccaagacaaaccagcgcaaacaaagacccaggccaaaccgagccagcagcgccagggcgccccaggggcgccagaagggggccacagggaacccaagagcacagcggcaggacagcggcccccgcggcccagaaggccagggcagcccccaccaaccccgaagacagacagcaacgaggaaggagcccagggccgggcacgacacaaaaccaggggaacaaggcaagagcgggagccagcccgccagacacccccgcaggccaaggcccccgggcaggcgggggacaaagaccgccggcagggcagggagccccagagcaggggggcggaggaacaaaagagcgaggaaggacaaacggaaccaggaagccaccaccaacagggacggaggagggaagaacacaacgaacagacaaaggcagagcccacccgggaacacgaggcacggacagaaaggagaccaggagaagcgggccagcagcccagagggagcgacaaaaacgcacaaacacagacccgcggcccaggacccgaccacccaccagggcgaggacggaggacacgaagcaaggaccccagacacgagggcgaagaaagaaggggcaaccgccacgaggaacgggcgcgacagagcaccagacacaaaaagggaagcaaagcagagcacagggccaaggcaggggcagcacagcggacaggacaccgccggggcccaaggaagggcaaagggaagaagggcaccaagagccgagacgggcaggggacaaaagaaaccaccgagccgggcaaggagccacaccagcccagcacgggaggcagagacaggcggacgagcgaggccagccggcacagaggagccaggcagccagggcacacagagaaacccgcgaaaaaaagaagaagaagaagaagaagaagaagaagaagaagaagaagaagaagaagaagaagaagaagccacccaggacaccaggggcggagaggaaaaggcagagcacccaccccaccccaaaacccgaagaagggggggccaggagaggaagacagagaaggcaggggggacggacaccgcagacgccccagagaggacagacccccccaggaagcaagggagacgagccacgcccggggagcaaaggggccaaacagaggcaagccgggccacagggaaacgggaaaaacgcagccaggcgaggagccagggacagaaaccggccaaggaacaggacagccccacggaagaacaaggaaccccacgacaggggacaacacgagggagcaaaaaaaaagagccacggagaaaagacggcccaagaaaacgagagggagagaaccacaaacacgcaaggaccaccgccagcaccccagaccaccccaccccccagcccaaggcgaaacaaacccagaggacgaggagaacagagcagcagaagaagaccgaacgaccaccagcgggacaggccccagccacccccgcagccagccagggcaaaccgcacaaggggagcgaggcaaagggagagaagacggcaagacccagaacaccagacaacggccagacagggaccggcaggaaggcaaggggacgacgagagcaacaacgaaacgccacagagcaaaagaggagacaagcaaaggcggcagggagagagagggcggagaggaccagccggaggaagacacgccaggcagagaaggcagccgaagaacaaagaaacacagcgcccaaccacagacaaaacaacaagggccccaaaaagagaaccccaggaacccaccggaaggaaaagcaacggaacaagagacacaaaacaacagcagacaccagggaggccagacagggagggcagcggcgggaagaccacaccgaccgacgacaagggacgccaaccccaaacgaacgaccaggacccaaagacagacggcgcacacgaaccgcccccaaaggccaaggagaaaaacccacgccccccacaaaggccacggagagagggggcgaacccgacggggagcaggccaagccaagcaacacagaggacccaacgggacaggacggaggccagaccggggagaagcagaaagagagcccgggccccggaagggaaggagcaaacgaaaagcaaaagagggcaacacacagcagcccaacaagcccgaccgggagagaggagaagagagccagaagcagggcaagagaaacagccagaaagcagcccggggccagaggccagcccgcccaaacgccagagacgggcagagggcaggagagaacgacccagcgccgcagcccaaggcaggcagagccgggacgcggacgcaacccggaaggcgcgcagaccagagagcgccaggaggccccagaaagccgagaacaaagaggcggaaacacacacgcgaaaccaccaacggcgggcccaaaccaaaagagaaagaagcgaggaagcaaccccccccccccccccccggggggggggggggggggaccgagggggaaagaaaacccgaaaaaggaagagggaccagaaagcgggacgaggaaacagcaaaggcacaaacacgaaaaagcagacgagggagaaaaggcagccaccaacaggaagagaggaagccaagggcacaagcaagggggcagaagagcgaaggcacagcacagagaggaagccgcagcaccaacagcaggagacacggaggcggcaggcaccgaggacccaagacagggccgagagcccggcgccgaaaccacgagaccaggcggcccgaaccggaaacgccgcccgcccccaaggcgggaaaaggcggcaccacaccacccggccacggacaaacagcacgccgcccaggacaagaaagaagcgaggaggacaaggaagcaaagcacacgcagacgaaccaagccgaggagacgacagcaaaccaggcgcgcagcgccagcaaagaaacaccggccacaggcacaagaggagggaaagagaccaagacaccgcacaggaaaccgaacaggcgggcaagcaggcaaacacaagagcaagacccaaaaacaaaaaaccacaggacaaagccgagggcccccccacccacgccccacagagcaccccgagcaagccccccccgccggggacaggacaggcggggacaggccggggacaggacgcagaacagggagaggaacccagaaagggcaacaccaggacggcacggcaaggagaccccccccaggaaccacaagacagaggccggggggccccaggagccaccaagccagccgagggacagcgacaaacaggagcccaaaagcacgcaaggccccccaccccccacggccgcagccgcccaaacagggacagagcccgcaggacaaacccgggagccacaaccagcccgagcgcgcaaagaccgaccacagcaacagaacccgaccagagcgacagcacccaacagggcaaagcaaaacagacgagacacaacaaaacaacagagcagccccccccagggcaggcccccagcaaggaccaacaggaacagaccaggcaggaggccacggcagccggcccaaaccgcaggaggcagacccccagcaggcaggcaccacgcacagacaaacagcgccccaaagcgagacaaggccacagcacaggcggcccaaccacggagccaggcagacgaacacagacaccggggagaaagcggcccagggagggcacaaggaaggcaccgggagaggagaccgggaggaagggcacggggggggcgaaacccccccagcagggggagcagccccggaccggaacagagagagaacccagccccaggccagccgcggagcgccagcccaccgagaaagacgaacccgaaccgaagcagcccaaaaacggccagaggggccagagggccgcacaacaaggaaacccaacaaaacacccccaaagcgacacaggaccacacaacaacaagaaagcgaacagacagcaaggggcaccaagagaccaggggcacaagcgggccaccagacaagccccagccggaagaaaaagagccacgccgaccccagaaagaccagaaacagcaaacaagagaagccaccaggcacgggccgagcagagcaggccaagcacgggaagggcgaccgggaggggccagccagaggcacgcgagcagcagagcagggaaggaagcagaacacgggaagacggccccaggaagggcgcgcggagacaggaaacacgagagcaagccggagggaaaggaccaaccagcagaagggccagagaccagcgggacacagcgagcgaacaccacagcaaccaaaaaaagcagagaaaaaaaaccacacacaagccccccccccccccccccccccccccccccccccccccccccccccccccccccccccccccccccccccccccaagacaaggacccaaagcccggcgccagaacgcagagaccaagcggcccaaacaacagagaccacgccgccaccccagccccccaccccaggcgcacaaagggggccaccaccaccgggcggcgcccaagaaaaaaagagaaaacagaacgagcaggcgcgcgcccggggggcaaagggggggcagagaaggcaaaccaggagcggagccaggggcgagccaccagggggggaacagaacccaggccggaagaggggccaggcccgagcaccgccgggccacaaacgacaagaaaacgcaaggaagaaacaaacagagccaccaccacccagccccaaggccccaaggggcgaagaaggacacgcagcgccaggagaacacagaaaagcaggagaaggaaaccaggcccgacaccacagcacgccaaagagacaagacaacaacccaaacaacaccaaaaggggaaagggaagacaagaaagaaggccagccacacgccggagccaaagcacgaggcggggccgcacgggggcaacaagagcaaaccggcaggagcgacagagggggacgcgaaacacagagccagcagccgaagcccgggcggaaaagccacagcaaagccggccaagggggcgaggaaggagccgaaggaacccggggccaagacgggcagaccccgccgccacgcagaaggggggcgagaaccgagagcccgaagacaagagcggaaagcaagcccccggagcaaacccgcggaggggagaggcccagcaagcagagcagcaggcggcgccgaccccccagacagcagaaggggcaacagggaggacaggaaggggagaggccccaagcaaaagccgagcgcggggcaccacaaaacaaacaccagcaaagccgccccgccggcccaaagaacggcgaaaagccccaaacagcgaggagaggggaaaagacagaggcaggacagaaaacagcgacgagcaggaaagcagcggagcgacaaggccagagccaggcccccaccagcaaagggggaggcgcgcgcacaggcagcagggcgcggcgagagcgcgccgcgccacgccacccacccccacgccacccagggacagggccggcaagaaccagagccaaacaaagcccggcagccacaagccagccgcccaagcgcaagagaacagacacgcagaaaggcagggaaacagcaggccaggcagaagcagcgacagccggcaagagcaccaaagggcccgggaccgggaagagccaacggagaccccagagggaaacagacagggcaacccaaaaccagaccaaagcgccagagccaagaaaaggcaacacaacaaccaagggcgagcacaaccggggggggaggggagagcaccaggagacccaggagacggacaaaggacggcgccccacaaacagagcgccagaggacacagagaggaaaacccagagcacaaaaccaggagagaaaaaacagaagaaaaagacagcggcgggacccggccgagcccccgcagcccgggacacccagaccagcagcaccacccggcaggggcggacagagacaaagagacacacccgcggggacagcccggacgcgagccaaaaaaaaaaccaaacacgacaaaacacaaaacccgcccacgagggcaagccgggaggaacgggaaaaaagacaaagaaaccggaggcacagcggccgggaggccccgggccacaaccccaccaggccccaggagcacagaagcagcagaccaccccaaaaaga

SEQ ID NO: 673 - RNA, 2671 nt, Mus musculus
ggggacgccagacacgcgggcggggcccaccacacccaaaggcagccacagcgagggcacagccacgccagccgggggacgggaggacaagcgccagggaaaagggggcaccggagccccaaaccccagagagaagcagccccgccccccaccaagaccaggcacagcaagccagcaggcgagagcacacacggggcaggggagggccggaccccagcagcagaaggacacgcacccgggagagggacagaaagcggaaggcaagaaggggccagggagagccgggccgccggcccaggcagcaaggagggcacggccacaaaggaggggaaaccaaagaaggccaccaaaggacacagggccagcccgcggcggggcagggcagaaggcgaggccgcggaagagggaccacaccccagcaagcggaacggaaacacaccccagaccccaccaaaaaaaaaaaaaaaagacaaaagccgcagcaccaacccgagagaaccccaggcagccccccgccccgggggacaggacgcccggcccggccgaccaggccaggcaggccagcgcccaaggaccgccagccgcaagcacagggggggggggcagggcaaagcgccgcaaaaggagagcccagagacccaggagaacccgggggggcaagggagaaagagccacagccacagggggcaggagggagggagcccggggacaccagacagcacaggagagcagaccagacccaggcaggaccgggccacgcaccccagccgggacggcaaggggcaggcacccagccccacccgacccgaaacaacggcgcgcgcaagacaccaggcccacacgggggggcggggggggaccgggggaaagaggggggagggaacagggccaggagccaggcgcccagagaagagggagaagacgaacgacccgccacacccgagaggggaacaggcaaacaccagcccagccggaaacagggccccagagcccaggcggcccaaacccgccccgcccagcccgggcagaagacagcagggccacaggcagcaaaaccagcacccccccagcccggacaacaaaaacaagccagcccgaggggccccacaccccccacccccacaacacacacacacacacacacacacacacgaggggccgcgggaagaagagagacgcggggcccagcccgacaaaggagaggcccgagaggccggcagaggggagggggcccagcgaaggggggcagacaggagacggaaagcacagaacaggggggggggggaaaagaggaagggaggaaggggaaggcagaggaaggaagcggcccccagagaacgccccacaaagagcgcacgacgcaggcacccagcggcagccacagccggcccagagcaggggacaccgagcaggcacccccccacaagggcccccccgaaaagccgggacgagagaaaacaaccaacaaggcccacccgaccccccagaagccaagcaccccggggacacaagcccagcggccaggaagacccaagcgcacacaaggagaaagaggaagaggggaacccgcacagagcaggagccgccaagagggcgggcccgcagacagcaggagcagaaggcacaaagaagagggagggccggaacgccagaaaacaaccccacaggcagaaaacgagagggccgacagagcgcccaggcaagaccagccaaagcccgaccaggggccccgagcaacagccgccccgcccacagggcccccccgggaaagggcccggaagccccggggacaggccaaggacgcccaaagggaaccggccccaccccccagacaacacccagagcaagagggcaagccaaaggcccggcaacgagggaccaccggaaaagcacggagccgcgcagggccacccacccagccgaaacccgacccgcagggcccacaggagggccaggagggggccccagcgaaacccagccggggccagccaggcgccccccaggcccagagagcaaggacagggaagagacccagaaaaggaaagccggggccaaagcagaggcccccccaaacagccggagaccagaccaacgcgccgccaccagcagccaaaaggccgcgagcagagggagaaagcaagcaggccgagaagcccaaaagaacgcgcggccgggaaggaagcaaagaacagggaagcccccccgagaggagccagggacaaaggcacgcccacgcgagaaacccggaaaccacaggggaaggagagaaccaacccccagggccccgacgcacaaaaacacaccacacaccccaccacacccacacccacccacccaccccacacacaaaaaaggagggggggaggggggagaccccgggaaggggaggcccccccaagaagaaaaacaagagacacgcagcgccagacagaagaaggcacagacccaacagaggcggagccaccaggggcgggaagaaccaggacagaagagcagcaggccaaccacgagccaccccagcccaagaaggggggagggccggcacggaacagccgagacaggcagcccgaacaagacgaccaccgccacccgacggggacaaaggggcgccaccagcccagccaaaaagaaaaggagaaccacagggaccggggccgcaggagaggagcac

SEQ ID NO: 674 - RNA, 2323 nt, Mus musculus
  misc_feature (1111)..(1210): n is a, c, g, or u
ggggagaaccaacaagagaccccacccaagagagggggcacgaaggccaagcggcccaggcaaggcaaagaaaccccgcccagcccaagagcgcgggacgaggccagagcaccaggcggcccagagccacgcaaaacaacccaccgaaacaaaagagcgcaagccccgcgcaaaacaagaccagaaggaccaaaaacgcgccacaaacggcagccggcccaccagcaggaagcagggagcaagccacgggggcggaaaggaaggacaaacccggcaagaggcgcaggacagcacaaaaggaacaacaccacgggggacaggacgccccaccaggacaagagccaacgcagacgagcacggagcgacggaggccacacggagcacaccgccaccccgggggccgacaaagcccacagacaaaaaaaacgcccgcggaaggacgcagcccaagaggacaagaagaaaccgaacagaaacagacagagcggaggccaggaaaaacacaagacagccccagcgagaacccagacccgcagagcagaaaagaaagaggacggaaaaaaaaaaaaaaaagaaaagaaaagaaaagaaaagaaaaagaaaaaaaaacgcagacacgacaagaccgacgccgcccaaaagacaggaaggggccaaccggcgccgagcccaaagcagagaaaaaaagacccaacggcacacccacccaccccccgagccccccgcagccacagagacacagacaaaaacagagggccacaacagaaggagagagaacggacaccgcccaaacagagagcacccagaacaaagcaccagcagcacacaccagcagcggcaggagcaagagcccccgaaaaaggcagcaagaacagagcgagggagagagagaacacaggaagccagcccagggccaccgggggaaccccacacgggacagaaagccgcggggaagcaggggggggcgccaaggaccaggacacagaaaggggagggaaacagaaaaaaaaaaaaaaaaaaaaaaaagccgacggaacaaacagaggcaccgcccccgggaagaggcaaaggcaagccagggggcaagaagaggggaggccacgggcaaccnnnnnnnnnnnnnnnnnnnnnnnnnnnnnnnnnnnnnnnnnnnnnnnnnnnnnnnnnnnnnnnnnnnnnnnnnnnnnnnnnnnnnnnnnnnnnnnnnnnncccagaaagcaagaagaacacagccaaaggaaacgaagcacagcggggagaaggagaaggaaacgccacgggaaaagacgggccccccaggcccgagccaaggaagccaagaaaaaaaaggaaggaaggaaggaaagaaggaaggaaggaaggaaggaaggaaggaaggaaagaaagaaagaaagaaagaaagaaagaaagaaagaaagaaagagagagagagagaggaaagaggaaggaaagaaagaaggaagaaaggaaggaagaaaagaaggaaagaaggaaagagggaaggggaaagaagggaggaggggggaggaaggaaggaagaagaaagaagggaggggaagaaagagggaggaagggaggaagggagggaggacaggaggaaagaaggagaaagaaggaaggggaaaagaaagaaagaaagaaagaaagaaagaaagaaaggacgaccaaaagaaagaaacagacaaacaaagaaaaggaggaaagaaggaaggaaggaaagaagaaaaaaggaaggaaggaaggaaagaaggaaggaaggaaaaaagggaaggcaaaccaaccaaccaagaaagacgccgagccaaccgaagcgagcccagcagccaggagaacacgcacacaggcggaaggagccaggcggcaccaacccacaggcacgagacgacagcaaaaaggacagcgaagaaggagaaggcacgggccagccccaaaggacaacaccaagcaacgacgcggaagaccaccggcaggaaaaaacaacagcaaacgaagcgggaccaacaagaccagcaggcaggggagccacggacagaaaccggcaaaagacaaaggggagaaggcccgggccacaacaggggaacaacaccaggagagcaggcacgaggcaggagcagggcagcagccacaccccagacggaccaacaggaagaagagagacaggaagaggggaccccgcacaaaacacagaccaagaagcaagagggaggaaagggacagcacacccacagcgacaccaaaggaaacaggacggaaccaagcaggcagggaagcaggagcgagcagaggcccaggagggagacacggaagccccggcgccagcgc

SEQ ID NO: 675 - RNA, 9737 nt, Mus musculus
gagggaaacagaggcgcccgcggaggaccaagggaacagaagccgagaaaaacgccagcccagagagccgaaacacaggaaggcccagagaggaaacagggcaggaaaggacgcgacggaacccgccgcgaaacccgaccccccgagcaccacgaaggccggacaagcagcccgcgcgcggcggacagggcagggccccacccccccgcagggaaccccccaagaagaggaagaagcaaggcaggaaaagaaaccaccagcacgggcgccaggcgacaaaaagccgccggccacgcacaaagaggcgccccgccccgaggccgcgccagcgaagagggcaaacaggcgagaaaggcgccaggacacaggagcagcgaaggccagacacaaaagggagggcccaccccccccacccccccccccacagcagaacgacaggaaggagagcccccgccgccccggggagaaaaacggacacgcagagaccccaccaccacaaggacccgaaagaacggcccacaacacaaaggggaccccaggacgaaaagagcccgaagggagacgggggaccacgcccgcccaggaaagcacaggcccggaggaaggaaacccgccggagcacaaaacagcagcccacacaacgccggcagggagggaagggggggacacagaagccacagacaacaagaacgggagggccaacccccgacccacaaacaggccagccgaaggacgagggaagaggccgcagggccggccaggaaggacccccccagagaaacaaagagaggcagcacacagaaacccaaacacaggagacaagagcaaacagagcagaggggcccacaccaaaagccacggcgcacaggcagacccgggaagccaccccggagagcagacacaagcaccacaacccaacaccaccagagcagaaagcagacaccaccaacagagcggagccaagccagcagcccagcccacagccccccgacaaagagccagcccggccaccaggccaggcgcgagcgggcccacacgagaaaggaagaggcgggagaaaccccagcccccccaggccgaggagaccgggggacccgcaggccacacccgacagagagagaccccacccccaagagcagggacccagagccgaagaacgccaaaggccccgaggccagccaaggaagacaagggaagcagacgccaagagaagccgaaagaaaaaccggcgggccaacgccccaaacccaaagcccgcgcgcccacaaccgagacagcagggccgggacggccagagaaaggagaaaaaaacaggaaaaaacagccaggaggccaggcagggggaacacgccaacccagcacgggaggcagaggcaggcaaacgagcggggccagccggcacagaggagccaggacagccaggacacacagagaaacccgccgaaaaacaacaacaacaaacaacaacaaaacaaaacaaaaaaaaaaccaaaccaaaccaaaccaaaccaaaccaaaccaaaccaaaacaaccaaccaggaagagacccccaacggcaaaagcagcacaaggaaggaaaagacccacaggaaagacagaacagggcagaaagcaggaaagcaaaggcgagcaaagccagcggcaagaggagcaggacagccagggcgcacagaaaaacccgccaaaaccaaaccaaaccaaaccaaaccaaccaaccaaccaaccaaccaaacaaacaaacaaagaaaacaaacaaaaccccaaaaacaaaacagagaaagaagaggaaaaggaagagaagaggaggaggaggaggaggaggaggaggaggaagaggaggaggaggaggaggaggggaggaggaggggaggggaggggaggggaggggaggggaggggaggggaggggaggggaggggaggggaggggaggggaggggaggggaggggaggaggaggaggaggggaggggaggggaggagaggaaagaacaagccaaggcaggcagacacaccccaggcgaagggcacggccgggagccagccacgccgccaggcacggccaggacgccaggaacggagcaccccaagacaagcaaggagacaacacccgccccagaaggcaccggacggacgcacaacggcaaccccaaaggcaggcgagaccgcaaacccagcggaagcggcaccggacacgacaacaagacggggaaggaaaagcgacgccgaaggcagaagggcccccaagccccaccccgaaaaccagcccacccgacccacgaagaccagaaacccacgaacgaccagcgccccagaacaacagggcaccagccgcacaacggacaaaaccacggccaccaacaacccaaccccgccaaacacgacccaaaaccccagggcaggaaggcaggcgaacccacacgagacagaccaggacaacaccacccacgagcaccagccaaccccagaccccaaggcagccaacgaacccccacgccaagacagaggagacagaaaaggaggcccaggggccacacagggcaccaaaagagacaccaccgggagagacaggcaccaaagaaggaaagggcggagagaggcaaaggcaagagcacgacgcgagcaacccagcaacacaggggggccacagccacgaagggacgacaccccccagccgggcgaagacagcacaggaccaagaaaaaaacaaaaacaaaagaaaaaaacggacccaaccaaaagcgagacagaaggcgagggacgacccaaaggaacaagaaaagacccagaaaagaaacaaaagcaaagccaaacacagagcaaaaaaacaacaacaagcaagagcaggaagccaagcggagcgaccaacagaaggcacaaaccaccaccaccagccacccgggaccacgggcgagaacaccgcccaccgaagccgggccaaaagcaagcccggacggcaaggggcagacgcaaagggcaggaacaaggacggcccaaccgagccaaacacaagccaccaaacgaacccaaaaaacagagaagccgccccaaaccgacccagaagaacaacccaccaggggccccaacccccaagccaggacccccccaggacccggccaaagggccacaagagcccaagaaaaccagagacagagccaaaccagaagaagcagcaacccaggcacaaaaagaaaccgaaagacaaacccgggagggggggggggaggggcccagggcaccacccaaaggcacccaccccagacacaagaaggagcccagacccaccagagaggcgggaacccgggaagacacaagaaggagagggcaaggaaacgacaggacaggcggcaaggcagcggccagcacggcgccggaaaggcagagcagaaaaccagccggccggccgcacccgggacaggccaaggggaggccggggcgcggacagcaccaacgaggaggacacgaacggacgggaccgacagagaggaacacccccaaagaacaccaaacagaaaccccgccaaccacccccacgggggaaaagggcccagccagcccagggccaggccagggcaaggcaggacgcaacaccccacccaccgccaggaaggggggcgaagaggccacaagacccgcgaaggaggaaacaagcgaggcccgcagaacgccagaaggccagggccccgggcgcacggaggccgagacgacaggccaggccggacaccccagagcgcggagacgggaagagcggggggagggcaccgggcggccagcccgggacgcggcgccagcggaagccagcccagaggcagagaggccccggggaggagagggccagaggaagaccgcccagcccagcaggggaccgagagaagagacagccaggaaggagcaggcaggaaggggagcaagagggagagaggaaagagaaaggcagagagaaggagagagagagaacagaagccagccaggcagggagagaaggggaagggaagcaagagggggggggagcaagggagggaaaggcaagagaagagcaagagagggaggagggggcaaaaccccaaggggccaggccgccggcggccaggaacggggggggagccagacagaaaccagagacgaggcagcccacagacgaggccacagaaaggagcggggccaggcaggagccagggaggagcaggcaaagggcccgcccgcaggaacaccgcgggcccagggaaaccagccacccagaaaacaggcgcccggccacaccggaccggggcagaaggggcggaagcagagaacccaaaagaggaagaaacaagccggggccagagaaggagcgagagacacgaccacagggaaggggagaccaaaggcaaccccaagaaagcaagaaaacgaccagcagagccagagcccgccccaccggcagcaagacggcgaaagcccaggcaggccagaaggaacgagaggcacagagcccacacggagcccggagaagcggcaaaaggagaagcagacgaggaccaaggacaacaggaaagaggaaggaaaaggagcagaggggggcagagaagcaggagaagaagcccaccagggccagcagcacaaccaaaggggcaccacacacgaagacagggaacagggaagaggaggaggcagaagggcgaagagccaagaacggcaaaggcaaaagcagcaacccagcagggaggcagaggcaggcagacgagagaggccgccggcacagaggagccaggacagccaggacaacagagaaacccgccaaaaaccaaaaaaaaaggagccaaaggccccacccccagaagagccagaggaagggaaggggaggaaagcaaagggcgccgagcacaggcccaaccaaacagaaaccaccccagcaggaaccaagcaggggccgcagcacaaagacagaaaggaggaggggggagaaggagaagggaggcagaaaggggaagggaaaagagagaaaaaaggcaagacgaccaagaaagcaaaaggaaagaaaaaggaagaaggaagagcccaagggaagaaggacgcccagaaccagacggcgaagaacccaaacgcggcccacacggcaccacagcacaccagccgcccaagcacgggcaagaacagcaagacaaagggaagaaggagcaggggaaaggcaaggggccccccggggacacacggccccggaagggacgagacaaaaggaacgggaagaggcaagcaagggggccacaagcaaagcagagagccaacacaagacagggagcaccccccggcagaaacagcaacgaaggggaagggcaccagccacaacccaggacgcaaaacagaccagagccgccacagcccaaccccccccaaccaagccaggaacaggaagcagaacaagaaagaaagcaggggaaagcgccaggacagggggggggggcgggggggggggaggcggcccggcacccagagcaaggcaggagaaggagaggcaccgggcacacagaagacaccaaaggacgcaaaggaacacacacacacaagcagacggaagggagcgaggagggagcgcccccacaagccaggccagacaacccaacaccacaccaagaacagcaagaaagcagaggaaacaagccacaggaccgggagacaccgggcgcaaggccggagggggggacccacaagcagaccagccccaaccgacacaaggaggcaaaacaaaagaaaacgccacaggcaaacaggaacaacgcgcaggaccacacagccgggccagaagccacacagccccagcgcgcacagaccaaacgacccaccagccacagcacagcaaggaagccaagggaacgcaacgggggccgaacacagaagacacgcgcgggagggaccagcaggaccaccccacgcggcaggcacccggcacagcagaaacccagccagccgaaaggagaggcgagaagaacggaaaggcggggaccagaaggacgagagaaacggaaagaagcaagacccgaacaggggaaagaccaggacagaggagaacaaagcaagaaaaaaacacagcagccagagacaaaacaacccaaaccaggcccaaccggggggaccccagacaaaccaccaaaacaaaaaaaacaaacaaaggcacagagaagagcaagaaaaaagagggggcaccacaacaaaggaacgagaaggggagcaagaggccagaaccacgccaaaaacccgagggcggacaaccagacgaagaacgaaaaaacagcacccgcacaacgaaccaagccaccaacccaaagcagccacagacacacacccaagcagaagaaaaagacaggcacaccacagcagcagagcacacagaccacacacacacacacacacacacacaccaggcaagagagaaaaagcgacacccgccgacgagagagcgccaacggacgcagaaccaaagcacaaacaggggcacagcgaagcccccagagagccacgagaacaggccaagagggcggagagcaccccaacaaggaggacgaaagcagacaagacaaggccacccaaagcagccaccagcagaacaagccagaccaggccgccgagccagcccaaaagcgaagaaaaccagacccagacaagcccaaaaacacgcaagccaaaaggccaagcaagaaaccaccaccagcacacgaaggggaggaggcaaacagagacccaaagcaagcaaaacacacaacgcccaaggcaccccacagaaaaaagacacccacccccacaccccccgccccaccaacagaacccccccccgaacaaggcaggaaccaggaggaaccagcgaaggacagcgaagagggagagaggcgaaggaggccggggagcgcaccacccacaacacccggccacgcacccccagaagacccgaaacacggcccgcacaccaaaagacgcgggcccgagaggagcagcacacccgaccacggaccaaagaaacaaagagcaccacccaggacgcagaacagaagcagacaccccaacggaagcaaagcaaaaaaggacggggaacagcccagccaacccgaaagaggggaaaaacaaaccaggagaggggagcacacccccagcacagcaggagcaccagaacgagagagcgagcagggccgcccggcaagaagaaaggcaaaacccaggccaagccgccagcgaaagagaaacagaggaaggagcaagacagagggacaggcaaaaagcagaagaaaaccagacagccaagagggggcggggcagagggacgcacacagagccagcagaaaacaccggaagggccagacaccagaaggcgcaggacacacacacacacacacacacagacacacacacacacacagggcaggacacaagggcagggcaggggggaagccagaggaagaggcccaagagggagagcagaaacggcggcagccagacacaaggaaggcagcaaagaagcagaggcaaggaacccagaggaggaaaagccaagggaaaaaaaaaaaaaaaaaaaaaaaaaaaaaaaaaaaaaaaaaaacgaccggggcagggagagggcgggaggggacggccagcccagaggcacaaagcacagacagagggcgaggacaagacgaagcgcagcagaggcgggaagcccggcaggggcgggagaccgcgcacgaggggccgcacgggcgcagcaggccacgcggggccggggagcggacaacaggacccggcgaacgagagggagagaagagacaaagaagaggggagaggagaaagggaagggagggaaggaggagggagagaaggaaggaggagagaaggaggagggacagagaggagacaaagaggagaggcccaccacaagaggacagacacacgaaacagcaacagcacgaaaagcaggagaggaagccgccgagacaggggagcgaagagacgggcaaaccagagagcaagaggggccggccaggccaccaggacagagcagagacaggacccaacaaaaccacacacagggacgccccgcgcccaacccgcgacagcccacacgagccggcagagggccgaagaccggcaagcaaaaagacagaaccaaccgccaagccagagaccagacccgccccccccccaaaaaaaaaacccgagagagaaggcggagggaaacgccaggccccacccacggcaccggccaacaacagaaccgcgagaagaagggacacgagcgccagacacaccagaagagggcacggacccaacagaggggagccaccaggggcgggaagaacccagaccccgaaagagcagcaggcccaaccacgagccgccccagccccagaaggagacgggaaagccccgcagcagggcgaggcaggaaaaaaaaaaagaggacagacagccaagaacaaaggccaacagaaagggaagcgggcaaagaacagaaaagaaacaaagacaaggaagcaggaaaaagggagagggcaccgagagcacagggcaggggggggggcaccaccggagagggaagagaaagcaccgcagcaggaccgcgccggggggggggaacgaccagaacaggcagagcagagacccggaggccagaacagaaagcaaagggggaaacgcgcagcccaccaccagacgcggggcacaggaacgggagcagaggcgacaagagcgggcagccaggacccagaccacaaagggccagccagagaagaaaagcgaccgaccggaggcggggaccagaaaaggcaaaacacacacacacacacacacacacacacacacacacaccacgacaaacgccaccggccggaccacccaagacacagcaagcacgaaaggaaagccggagagacaaaagggcaccccaagaagaaaggagggggggaggggggagaggaaaaccacagcaaccgggagacaacccccggccccggggaaagaggacagggaaaggcgcgcgaacgcagacacgaggcaggcccgcccgacacagaacggcgacagcgaacgaaaggcaagcggccgccagggcgccagccaacccagcagcagaaagaaggacaggggccaggaggcccacggccaaggacaacaggggcaaccaaaggcacgcagaaaaacgccaaccgcggacccacagggggcaccggaggggagggagcggcagcccaagcggcgcggggagggccgcagcacggacgggcacagaggggaaacgcacgggcacgaaaaccaaaaccaaaccaaacaaaagggagaaaaaaacaaaacaaaaacaaaaaaccaacaaacaaacaagacggagagaaaaaggcacgaaaagcccgagggcagcgcaagcaagggcggagaaggcacacccggagcccaggcagaaagcgggaaagggaaaccccacaccgagcacccagagcggcgaagggcaggaacggagagggccgccaaggggagaacaagcggcccaggccaaggcaagaaaggggaaaacaaaagaagaaaacaccaccagcacacaaaaaaaacaacaagcaggcccaggaccagagcaagaaaacaggaaagaaaaaaacagaaccacgggaggcagcacagcaaggagagccagggccagggcacgcagagacaggacaagcaggacgagacaggggcaccgccagcgacacgagaggccgcagcccagacgcagacccgaggagccaaccggacggacaaaagg

SEQ ID NO: 676 - RNA, 1278 nt, Mus musculus
gccagaagcgcaggccggcgcacccccaccgcagacaaccaagcggcgggcccagaccaagaggcgaccgcgcgcgggcaggcgccccccagccgggcgggcaccgccccggccggaggacggaagagacagacaagggaccaaggaaagaagaagacccagaaagaacccacacaccaggcacgaccgacaagggagccaaaaccaccagggaagaaagacagcacaacaagggcggcacaacgggacagagaagaagcgaacgaccaacacccgacaaggcaaacaagggacaaggaaccacaaaaaccagagacacgaaacaagaggagaaagggggaaaaaccgaagaagggcacaggggaaaaaccgaacagaacagcaaggcggcgaagacgagaagacaaagggaccaagaaacccaaagcgcaaggcaaaagacacgcaaagacaaaaagaccaccaacagacgggaaaggacaccaccaaacagaaggggacaaaccaacaaaaaagaaccaagaaggggacccagaaaacaaaaacccccaaaaaaggggccagaacgaacaaagaaccaccgaggaaaccgaaggcagagaagcaccgaaaaaagcaacaccaacacagggaaagcaaacaaaacaacccgagaccacccacaccaggagaaggcaagacaaaaacagggacagcagagcggcgaggagggagaaagaggaacacccccagggggaagcaggcgacaaccaccggaaacagcggcggcccagaaaaggacaagacaccggaggaccagcaaacccccgggcaaaccagaagaagccccaacggaagaaggacacagcccacagcaagcagccaaaaagccagaaacggaaagaacccagagcccccaacagaggaaggaacagaaaagggacacacacaaggagacaccagcaaaaaagaagaaagaaaccagccaaaggaggaccggagagcacaccgaggaggaacacaacacaaaggaaccacacaaagaccacgaaagggaacagcccaaaaccaggaacccacgaaaagaacaaccaaacacagaaaccaagaaaaagaagacgaaggggacacagccccccagaaggggaacaaaacacccaggaaggagacagaaacaaagggagcgagagaaaggaggaccagagagacgccaaccagggaccaccccaaacagcaccaaacgcgacaccagcaaacagcaagaacgaaaggacccagagagcgccggagacagccggg

SEQ ID NO: 677 - RNA, 1303 nt, Mus musculus
gaacgaggaaaacagcacaaggcagaggaaacaccgacagacaaaaaaaaccgggggcacacagaaaccaaagcgaaaaaacaaagacacacacgaaagcacagccaaggcaaacaacaacaggcgcgaggacacaccaagccacaacaacaaccagaacacgaaacaacccagaaaacaacaaacaacaaggaaagcacaagcaagacgaaagcgaaggacaggaaacaccaaaacgagcgagcgaggagcgagcgaggagcgagagagagagagagagagagagagagagagagagagaaccggaaaaaaacagggacgccggccaaccagaaaaaaaaacgccgaaaaggaagaaacgagaaaacagggccaacgaaaaggaagagaacaagaaaaacaggaacacagaaccaaaaacaaagacaacaaccaggaagggaaaagagagaagcccaaaaaagaaaacacaaaaagacaggcaaaagacggaaaacgaggacccaagaacaccaccgaagcaccaacagaccgccagaaacgaagcaaggaaaaaagcaagcaaaaagcaggaaggagaaacgcaaagagccaaacgagaaaggagaaaggacggcgaggaggacaaacgaaaaacacaggacgagggaaggagcaagggagggaaagagggacgagacagaaggcaagagccacaggagggagagcaaagaacgaaaacaacacccaaaacaggaaaaaaaccagccaagcagaccccccacccaccccaaaccacccaggcacaacaaagcggcaccaagaaacacggggagcacaggaagcaggagagggcaaggcgccccagaaaacccaaaccaggaccgggccgagacccacaaaccagaccaaccgcgagccccaaaaacaccaaaaagcagcgagaaaaaagagagaaaggcgccccaaagccaagaccacccaggacagcagacacacagcgccacggacagacaaaaaaaacagcaggaacacgaggcgcggaaaaaacgagaaagcaaaagcgcaaagaccgaacacaacccaaccaccggaacggagacaccacccgggcaaaagcagggcccggccaccaccagcaacggcccgacccccccccagagcaccccagggagccccgacccacgccacacaaaacacccggaaaaacaagagaaacaggaacggaagccacccacgacgccaccccaagcaccacccccccaaacgcaaaccgacggacaagaagagcaaaaaaagaaagaccgaaaggaaaaagaaggac

SEQ ID NO: 678 - RNA, 2690 nt, Mus musculus
gggggggggagggggagggcaggagagagacccggaagagggaaacaagaaagcaaacaaaaaaacgaaaaaaaaaaaaaaaaaaagaaccaagagacagaagcggggacaagcaaaaaaaggaaaacgaggcaaaccaagccggcgcgaaggcacaccaaacggaaaagagagagaacgaacacgaaagcgaagaacagccgccacaagggaaaaaagaaaaccaggcaaggcaaaggaaaaacgacgaacacaagaggcaccaaaaacaaaagacagccaagggcagcaaaagacaaggaaagggccacaaaacacggaaggcaaaaaaacaaagaagacaccacaaaaggcaacaacaagcaaccagaagaaaagcccaaaaaaaaaaaaccccacagaccggaagccccaagaagcaaggcccacgaaagaagaccagaacaagacgaaacgaccaaaacgcaaccagcgaacaagaagaccgaaccaaagagaggcggcagcaaagagagagaacaaaagaaaaaaaaacaaaaacaaaacaaaacaaaaaaaccaaaacgggccgggcaggggcgcacaccaacccagcacgggaggcagaggcaggcagacgagcgaggccagcccgcacaaaggagccaggacagccagagcaacagagaaacccgccggaaaaacaaaacaaaacaaaacaaaacaaaaaaaaaacaaaaaaaaaacaaaacaaaaaacaaaacaaacaaaaaaaaaccccaaaaaccaaaaccaaaaccaaaaccaaaaaaaccaaaaaaccaaaaaaaaacaaaccaccaccccccacccaacccgggacgacaccacagccgccaaaaggaacgacgaaagggaaacaggagaagaagaagccaccaggcccagaagacggagaaaaagggaacagaaaaaaaggaagcgcaaacagcaagccgaaaacaacagaaaagggcagaaggggcgagcaacaccccagccgaggggcggaaagaccgcgggagggaggccacgagacagcaaaaaaaaaaccaccacaaaaagacacaaaggcagcaagcaaggccaagaagagacagaaacacaggaagagaagaacagcagcaagaagaaaagccccagacaagaacagcaaagccaagccaaaagcaaaacacaaaagcagaacaaaagcaacacaaaacccccccacacggaaaagaagagccgaaagaaaagagagaaaggaggagggagaaagcgacggaaaaggagaccaccgggccaggccagcacggagaagaggaacaaaaagacaagagcggcaacagagcaggacaaagaaaagggacccaaccagggaaacaggaaagcaaggccgggaccaggaaaggaaaaaacacggagcaagcagcaagggaggggccgaagccgcgccaggaccaccgaaccaggcggccaagccacagagacaccgcccgccaacacgggaaaaggcggccacacgcccagcgacaaaaaacaagagagcagaacaacgcaacaggaacaaacaccaaaaccacacgaaagaaaacaagaggcaaaccaagaccccaggaagcgagccccagggaaagaaaacaccaaaggagggccagggcagcgcacgccccacccaaaccacccaccacgcccagcaagcacacaaaacggggccccccacaaccaaggcagagccggccagggcagaccacacccccgccaccggggaggggacaccccagacaggggaaaccccccaacgcagaagggaacacaccccacgccgccccaccccaccagccaagggacaacagcacagaccaaagggccaagcgagcgccacggaccaagcaccccacgggccgacgcaacccccgaggcacacgaaccagcacaggcaaaccccacaaaagcccaagaccaaggaccccaacacacacaggggaaacgaaacagccacgccggaaaggaacccacacccagagaccaaaccagcagcggcgaacccaacccgaacgaaaccagaagaaggccaacacaagacaacgccacgaaacaaaaaagccaagaaagaaacacaacaagcacccaccaccagcagcggacccagcaaagagggacccaaaaggcggaaaaagaacacaagcacagggaaacaaggcccaaacaaagagccgagaaagcacaacaacgacacagaagaaggagcccaccaagagggaaagacgcccccggcccccagcccggcgcccaggcaggcacgccgaaaaaaacgcggacaccacgcgcggggcaccaggaaacccaaaaggagcccaacagaagacaagcgccaaaacacaaaacagcagggaaaaagagacggcacaggggcacggaacacagaacccagccaacaccaggaagacacaagacaacacaaaaagcacacacaacagaccgacaaacaggaaggacgagggaaagggcacaccaacacacacaaaggcacaaaaacacagcaaacaccagaaaaacgacgaaacgagggagggagccaaaccagaaccggagagggggcaccccaacagccaacaggaacgaacagcaggccaacgcccaaagcagcaggaaaagcagggaacacacaggaaaccagaagagagcagggcccgaaccggagcagccag

SEQ ID NO: 679 - RNA, 996 nt, Mus musculus
acgaggcagccccagagcggcagaggaagcgcaggaacgggcgcgggcgggcggagccggggggacgcgccgaagagcgaggagggggacggaaaccacaaacagacacagaaggcgaccaggaacacacccagaaaccccccgcaaacaagaagcaggacccagggcgcacaccccccccaccccaggagaccacgggccgaccaaagccgaccacccggaacgcaaaacagcaccagagaaaaccacccagaagcgaaccagcgcacaaccgcggcacaggaaacggccaccaccaggcaccaggcgaagaaacagggagagcagggcagaggagcaaacagaacacggaggccgaaacccaagaaccccacccaagaaaagcaaacacaaaggagaaaaagacggcccggaggaaagagcagagacccagcacccccaaagaccagcggggagcagcggcgcaggccaagaaagcaagcgggggccgaagaaaaaaaaaaagaaaaagccaaaggggaagaaacagaaagaaaagaacagaaaaaccaacccacaggaagaaagaaaaacaaaaaaggaagaaaaaggaacaacaagccggaggcaagggaaaaagaaaaagcgaaccaccacaagacagaagaaaaagaggaaccccacaaaacagagggcgagagagaagaggggacggagcacaaggcaaaagaaaaagaagacaaaagccacacaaaaacaagaagaaacacacacagaagcaccgacaacaggaagaagaaacccgacagagaaaacagagaaaaaaaaaaaaaaaccaccggaggccccaaaaaaagaaaaaaaacccaaaaacaaaaaaagcaaaacaacaacaacaacaaaacagaaacaaaaaaagaacacacagaccaacacacagcccgcaggacccagcaccccacccgggcacgggacccagcaccccacccgggcacgggacccagcaccccacccggg

SEQ ID NO: 680 - RNA, 14555 nt, Mus musculus
acagacacacacacacacacacacacacacacacacacacacacacacacacaccaggacccagcccccggcccccccccccgacacagcgccgggccagcagaaccgcaaacagagacccagagcggaccaaacccaaaaaaagacaagcagcggagagacgcagaaaggggcgaggagacaccagcgggggaggccagcagcagccccgcgggagccagggaaggcagacgagggccgagccacaccgcccccagagaggggcgggggaggaacaaggaagaacgagccccaggggagggcgagagaggccaggggaaacgcagcacagcagaggaccgagccggaacccagaccagggaaaaaaaagagaggcaaacccgggcggggggagaggaccccaggcccggccagcagccagccaaggcaagccaggagagagacccgcgaaaaaaaagggaacagagcaagaagaagacgcccagggacccaggccccacaaggcacacacccgcacaccccccagcacacacaccagacaacccccagacacacaccagcacaacacacacccagcaacacacacagcagcacacacccagcaaacacagcacacacacacccaacacaccagcaacacaaacagcccacacagcacacaaaccccagcacacacccccgcacaacccccacacacacacacacacacaaagggagaggaggaggcgcccagagaaacacaagaaaacgagaaaaggaacgccacagaagcacagcaaaacgacagagaagcgcaagggacaagacacacaacgccaagaggccgcggcgaaacaaaaaaccggaaagcacgggcagaggcaacaccaagagagcagcggcaaggagggaccacggccgcagcacacaggaggcaaggcacacacacacaggccacacgaggccagaggacaagcgccgccaccccacacccaagccaggacccaggagggaaggggcaggaacaggcagcgcaccgccccaccccccccagggaggacaggccaaccaccaagcccagacggagggggggagaaccaggccaggcacagcaacacccgaccacagagccacccaggccacaaagcgcaaacgaaaaaaaaaaaaaaaaaaaaaaaacaacacacacacacacacacaaaaaaaaaaaaaaacaaacaccaagaaaaaacgacccagggggcgcgcggggggaggagcagggcagccagcggaggaagcacaccacggggaaccacggagaacacaacccacacacgcccgccagcgggaggagagccagccagccgcccaggcccggcgggaacagaaaccagcaaaaaaaccccccagaagagcgagcaggacaccacaacagaaacgaacgaaaaaccccagcaggacagcgagaaccacaagagagggggaaacgagcgggcaagagaggacgcccaaacaaagccagaggcaaagacaacacaccagcgagaaaaagaagacggaacgaacagagcagcaggaacgacaaggcacggcggggaacagaggagcagccccaccagagcgaaggagaaccaggacgcagggcagcaagaccacaccacgagccacgcagcccaagacgaacagccgcaagcagagcgccgaaccaagaaccacaagaacagcagggcagagaagcagaccaagccgaaaggggaggaccaggcggagaaagaaggagcccaggccaagagccgcccgggacacaggaccaccaggccgacagccgagggggcgggcggagggacaggacacagacaacaccacggcaccagaggggcgaaacgcccacgagggaggcgccgcaagcgcggacaaacaggacccagcgccagggaggaaaagaaccaagccgcgggccgagagagggacagcagcgggcccacccccccaccaagggcaggcacgcgcacagaggcaggagcggagaagcaggagaggaaacacccggacaacagaaacagaccccgcaaccgcgcacaaacagaggcagcacagacagacgacccagagaaaacagacgaccgacaagggaaaagagaacaagccacagggcaaggggaagagcccgagcaaagcggagacaccccaccaggaccgagaagggcccgggcaggaagcaaagcgaacagccgccggacggaaccacccacaggggaagcaggacagggggacacccccggcccacacgaaagagcacaccgggaaacggggccccgggaggaaaaaccacccaagggaggagagaagaagagacagcagggagacagccaggggaaagagaggggcaacagagaaccgacagaaccccacacccaagaaggggcagggaagaggggggggcggggcgcgcagaagacccaagagagagcccaaccagggagagaccgccaaaaacaaaccaagaggacacaggaagacaccccagcaccccgcccacagccagaggggaacgcaccacacagacacacaaaggagacaggccaggaccggcacccaaaacgaaacaagcaaaaaaaaacagcaggaagaagacagaggcagggcccagaagccagaagagggcgccagagcccggagagagacaggcgccggaaggggggcgagaacgaaccaggcccgcaagagcaggccgcccaaccacagagccacacgcccaagcacaaaccagcaaaaccacagaagcccacgggagaggaaagcaacccagcacaaacacaagaacaggaacaccaacagggggcagagcaggcgcaaacagcgaaacaaaaggaaaaaaaaaggacccagaagccaggaacccaagcaagagagcggagccaccaacaacgggaagaaaggacaaccggagaagcgaggccaggggggagggggggaggcaggaagcggcagagagggagccaagcaccacgggacccaaaggcaagcccagacgaaaaagggggagggggcgggggagggggggggggggggggcggggggggacacagaggcagggccaggagccaggagagggcgccagaccccgaagcagagcacgcacccgagcagagcaggcagggaaccacaacagggcaaaccaaacgggacccaaaaagcagaggccagcccgaccaacgcccggcggagaagagacagggccacacagcccagaccaacagcgagccaccccaaccacaagagccaaagaagcaggaaacacacacaacacacacacacacacacacacacgcacacaacaacggccaagggcgggagggcgcggacacagagacccaacaaccccaccccccagcccccagagcccacggaagaaccagagggggcacacacgcaacccagcacgaggcacgggacccaccaaagagagccaggccaaggagggacgccaaaaagaagggcgcccgagaaggggacccaagggagggagcggccaggcagccacagcagacagagggccacaaaggggcaagacacagcccaccacgaacagcaggagaccgcccaggggaggccaccacagaagaaaggagaaagaaggccccacaggcagcccagaagccggccacgcacaagaacacacacacacacacacacacacacacacacacacacaaccccaaaaggaaccggccagaagaggggaaccagaggacagcccgaccaaagcgcccaaagaaacgcgacagaaaccccacccaacaacaaccaacaaccaaccaaagcagcagaggcaaaagaaggaacaaacaagcaggcccagacaaaggcaaaaaaaaaaaaaagccccggccccccacacggccagggagggacccccccccacccagagaccgggaaaaaccccagaagaaacaggagaggagagagaaggggcccagaaacaaagccgaaccaagccgcacaagggcacgaagagccccacaagcccaaggagagccagcccggggaagggccaaccgggaagcggggcagcagagccaggagcgggagggggccgggccccaaaagcggcaccaaaggaccaggagcgacgagcacggcaaaacaaagcaaaagaaaagcacggccccccagcagggacagaggggagccgagaagaaagagaaacggaggggaggggggccgggggaagggacaaggaacaaggagcgccccaggggacacgaaaaccggaacagacggggccccacggggggacagacaccaccgaaggagacacgcacagggcgccgggaacaggaaagcccagccccggggcagagcagcccgccagcggggaaagccccagcggcaaagaggagaccagggccagaggcggcaggcgcaggagccccaaggcacagagaaggacaaagcaggcgaggccaagcagaccacgcccaacgccggccgggcgcagccggggcgagggaggacgaggggaggcgggacccacagaccgcgcagccggcccacccaaccgggcaccaggggagaagccggagagacccaggggccgcaacgcgagaagccacagcccgagggagcagggagggagagaggaaagggaacaggacagacgaaacaccgccaaaacgaagcaagagaacacccagcaggacaggcagcccagggggccacggggaggaggggccacccaggaaggggagaaaagacacccggggggacacagggagagacccagccacagagcgcagaacacacccgaagcgcagcggcaccccccccccaccacacaccccacaccagcccggaagcagggcccaaggaggccagcggccgggggccccccggggagggccccaaggccgcccccagcacagcaggacagaacccacaaccaacggccaagaccggcgcgggcggagagacagacgggagaggaaccgccgccccagagccagccgggcacggcccaaggccacccaccccaaccccccgacgggccggaagggagggggagccaggcgaaacagaggcgcaacacccagaggaaggggagggggcagccggcgggcacagaggcagacaaggggaagacaaggcagaacggaacaaaaaggcagagagcaggacaggcaggcaggggggggggggggggcacaagcaggcccggaacggaagggcgagaacagccaggaccggccccccaccgacgagacaaaaccacgccacgcgcacgaaaccaaggcagcggcccagggcccagaccccgccagccccacgccaacagaaccggaccaggccaccaccacacagcaggggccgggggcaagcccgggcaggggcgcccgcaaggcccaccccgagccgacgggcacggacagggaagggcgggcgagaggaggaaggaaggcacagcacgaaccccccaccgagggcagggggggggaagagagacagaagcagagaacgcccaccaccccccccagcacagaagaggagcacagcccgggaccgacccaaagcgagcgcaccccacagcacagcccgcagacaaaaaccccaaaaaacggaaacccccccccaaccaggccggagcccagcacagcccccccaaccaccccgccggaaaaggcacgcacgcgcgcgagcgcgcgcacacacacacacacacacacacagagagcaaagaaagagaaaccgaccgacgcaccaagggccacagaaagggcacagagccagccccgacacacacagccagagagggacgagcccaagccgaggagaaaggcgcccccacgagggggcccggcgccccaagcgcccagaggagagcaagggccccagagcggagaagagcgcgagaaaacacacccaccgggcgcaggggcagggcaccccagagcggagcaagaagcgccgaggggcggacgccccggaggcccgcgaggggcgaagacccccaccagcacgaaccacccaccccccagagaaagagcagaaggggcggggagggggccagcagaacggccgcgaagaagccgaggcccgagccaggcccaccacaggcagaagggggcaaaccccagcaccacgagggcaaggggcacaaagacaagcagccgaggagcgcgaccagccagcagagaaccaaagccccaggcaggccagacccgaccaaaaaaaaaaaagagcagcagaggaaggcacgacacgacccgacacacacaccacacagcaccgcaaccaagaaacacacacacacacacacacacacacacaccacagcacaaacagggaggaaggaggaaggaggggaagagaggaggaagggggaagggaaggggaaaagaaagggaggggagaggggaagggcgaaaccccacccacaaggcgagcccagcccacacccagagcccccccgaagcccggaaggacccaccccacccgccaaggcccgggaaggccacgagaaaggccaccaggagcggcgcccgaggccagcagggaagggcagaaagggcccaaaggcacaaggggacagacacagagcaggacaaacccgcacagagaaaagaggcaagaagagccgaaaagggcgcagacagacacagggcagggacagacagacacaggcgggggccgcgaagcagagaccagacggccaaacaggggcggccaaaggaaacacgaggagcgacccaacgaaaaccaggaaacacaggcccggcaggccacccagggcacccgaaggacaaaccaggcagagcccacacgagaggggggggaaggacacccgagaaccaggaacccgcagaggaggggggaacagaaggagcaaccagccaaggcccagccccgaaaaggcagagaaaaagggggggcgcggcagccacggggaggccgggaggcaagggcagcaagacacccccccaccacggacccaggggcaaaccagcaacggcagcaagagccacggcgggccaccccggacccagcaccaagaagaggcaagcccgcacgcaaagcaggaccagcccaaccgcgacccaagcagccaggggggaaaccgcccccccccccccgcaaacagaaaaggcgccaaacgcaacgcacgagaagcaacaaaaccgggcaaggccggggacccccggagaggggccgcccgaaggggccggccccacggggagaaccacgccagagagaacgaagcaaaaaggggagaacgcagagacccccacagagggggcgcagcccaagggccaaccaagaaggggccccggccacggggagcccaagcggaagaagaaagaaagagaaaaaggggcgggggggccagggcaggggcgccggcaccccaaaaacaaggaaagaagggcgcaagaggaaagccaggagaaggggaagaaggggcacgagcgcgccccgccccgcagccccgacccgaagggcggaagaccaccacccagccgggccccaggggaaaaggaagaaggaagacaggcagcacaacccggaaacgccgagggcaccagggggaccccacccaacaggccagccacgcagaacacccacggggggggggaaccccccgacccggggacagaggcacagggggccgacagacacaaacagagcaccaggaaagaaccacggcgggaacgagaggggagggccagccgcggggcgggccaccccagggaggggccgagaaaggagcgaggagcacgggaagcaaaccaagcgacccagggccccagccgccccaggaccgcacgagccgccggccccgaagagggacgaaccaagcaaaaaacagccggaccaagccggacaggacagggcaccagaaaacaaagaaacagccggaccacaacagacccgcccacgccccgaggaaagaggcccggcagcgggccccaacaccagccggagaaagacaggaagccccaacacaagcgacacccggaaacgcagcgaaagcgccaacgccaagcacgggccaaaccagaagcccgagggccagagggaagcagcagccacaaccgaccgacggacaccaggaacaacgacagagagagcccagacggcgcagcgccgaccgagaccggccaggaaggaggagccacgagcaggacacacccaggcagcgggagagcaaggacgggcacgggagaggccaccccacaaacagcggaagcgaccgggcacacaccagaggggcccccccgagacagggccgacacccggcgccggaaccaccgagcgaccaggcggcccgaaccagaaaccaccgcccgcccccgaggcgggacaaaggcggcgccaccacgcccgaggcccccgagggaaagacgaaacccggaaacagcccgaagaaagaaagaggaaagcaggagccccgggaagggccaacgcacagaacagcaagggccacaccagacaccacccaagacccaaaacgcaacccaggaacacccgagcagagcgacggggggagggccccaccagcccaggaagcccccgcccgaagccggaggccagagagggggacaggccccaccccggcacagcccccgggggccacacccggggacggaaggcagccagggaagaggcgccggggaccagagagaaccacaagggacagaaaagcgagcacgcccagagcagggccgacaccacagagcccccaacccaaacggacacagcacgcagacaagcccaagcccggcacggcagacccaccccacagaccgccgaaaccagaagcccccacggaccgaagcccagcccaaaaaagggacgcggcccccccacccccacccacccaccagcccccccccgcgcccccccccccgcccccacgggccagaccagccccccaccaccccccgccaaaaccgagacgccgccacaaggccgccagcgaacgagggaaggcccccaaagaaccggcaacccccacggaaggccccgcacccagccacagacggaccaaagacccgcccacaggggaccacacagcgccccccccccacccccgcccccgccccagagcgacgagccgcccgggcccccacccgccccccggaccaggggaagcggagacgagaaccgcaggacgccccgccacccccgccaagcgggcaagcgccccacagccagacacccacacgggggccaggggaaagggggcagcccgcgcccaccaaaacacggaacgggggaggggccacccccccccaacccacgccccacaacccacacagacaaagacgaagcaggccaaaggcgacacccacaaaggagagcaggaggcacccaagagcagagccaagcgggaggcaagacccgagacaggcaacagcacacgccaacccagcaagcggacacccccggaggaagagggccgcagccagaagaagaaagcaccagaggaccagaggcccacaggaccgaggaggaaacacccgacccaccgccaggagcggggagccagcagggcggagggagggcacgcagaccccaccaagcccacccaaccccccagaccagcgagagacacagccagacggcgggggcccagggaggagggcccagcggagccgccaccagcacagcagagggcacagcagggcggggcgccgcccccagcgcacggcggccagaggcggcgcccccaggaccccagaaccagccacgccacccagacacccacccaggagaaagacgccaccaggggcccggagagaagagcgcaagcccggccggacccgcaagaaaccggggacacgaccagagaccccaccaaagcgcccacccccagcagacaaaacacaacacagcacaacaaagcgcaacgaaacaggagccggagaagggccacggggggcgaacccaagacgcagccccagaacccacccgagcggagggggagaacccccaggccgaacgaacgaaccaacgagacacaaggggagcaacaaaggaggagagcagagaaggcccaaccggaccggccagagcgcaagaacgagggcaagaagaccgccccaagaacgaggccggccgcccccgcacgcaacgcaagcagccacgcccccccaaaggaacaacacaaaagacagagagaggaaagaccagcaccgcagaaaagcaccacagcggagagaggaggccagaaggggcccaggagggggaagcaggaagccgccagccggggcgccagacccacggacaccggcaaacagcaagaaggaggaaaagccaccggcccgagcaagcagaccgacgcagagcggccaggagagaccacacccagaccagcaacaggcagcggccaggcgggagaggggggcgcacggccggccacccagcagagcagagaacacacaacccaggggggcccacagagaaggccaacgaggccagccccgaccccacaggccaagggccccaaccgcccggaaggacccagcaccacgccaccacccaaacccaaggccagagaagagaggggacacggaaagcaaccaaccgccacacccgcaccagaacgcacagagagagagaccgagagagccggggcagcgggccagagccagacacagaccacggcaaaccaacagagaggagggggcccccccgcacgcccggacacagaaccaccaaacagagccaagaaaggccgcacacaggcccgccgaggagcacaccagccagggacagacccacgacgaagaacaagacccagaaacagaaggggacggagcagggacaagcaaccagaagaacacagagaaggcaaagcacagagagcagcgccagaagcagggcagaagcagagaaggagaagggggagcaaagcgggggagggcgaaagccaggggcagaacgggacacagacacacccagagacaccgcggcaaacccaacagcaacccggcgcagacggggcgcaaggaacacacgcccggccgccccaaccacacaagaagagccacagcaggaggacggggggggaggaggagggccgggaacccgacccagcaaccccaaacgcaaaacaagcacaaaagaaaaagcaaggggagaaagaaaggagagaggagcgccagggagagcagagggggggaacaaaagcaaagagaaacagcccaagaagaagagcaaagagacccccacccaccggagcccgagcccaccccgggacagaaaaaaggcccgaggcagagcccccccagcagcaaaagaaaaggaagggggggaagggggggacagagggagggggccccggcacagaggcacaaaccacaaggcaaaccaaaaaagaacgaaaaaaaaacgacaagccaaggaggggagacaaagacgcaccccgagacaagaaaaacaaagccgggagggcggagccggagcacagaaaaagacgggagcagagagcccaaaaaacaaggcgcgcccccgcggaagaaaaaaccagaaagacggacacgaacccgcaaaaccagggaacgggaaggaacacaagagacaagaagcagagcaccgccgccacccaaggcggccagggcgggccggcaggaggcagaggcggcaggggggcggggagacagccgcccccccgccccgcgccccgaaaccaacccaccccagcccccccccaccgcacagccacgcgccagaggggcacccggggcgggacagcgaaaagcaggggaggaaggcgggcgggaagaaaggcaaagaaagagaaaagggaaggcccaccaaggaagaaggaggggaaagagagcaggagggagggagggagggagagagggagggaggacagccgggggggagcgccccgcgccgggaacgggaagcagcacacggaggacaaaaccgaccaaagccaacaggggaccccacaacaggaaaacaacccaggaaggccacaagcagggaagcacagagaggaagaacagcgaacagaccacacaaaagcaaagagaggagaaggcacggccagcagcccacacaggcaaggccagccagggaagcgcgccccagggacggaaacagaacaagaaaccccacagacagcccacaggccaaccgaccagaaagcccagggagacaccccaaggacagacgggcaaagacaggaaaacacagaggaaaaaaaaagagagaggaagaacgacgagagacagccccaggagcccacgagccaaagacccaaaaacacgaccgagagagaaccaaaaaggcacccgggaaggggcaggaaggaacgaggggccagggaacggaagcaggggggcaaggaaccacagggacagaaaccagagaaaaaacacgagggccgggccacaggaggccaagccacaggagcacagcaccaccaccagaaagcagagagagaagggacgcgccaggaccccccaagccccagccaggggagggccacccaccacaggagagaggcagagcagcaaaggaggggaaagacccacgaagacaacaggcacagccaacaccaggacacagaggaccagaaaagaacagaggagacccccccccccaaccccccccccccccccccccccccccccccccccccccccacggccaagacgcccaaagacaccgccaagacaaccaccgcagacccagccagaacaagagggagggggggggggagagaggggggggggacacggacacccagacagacacaccggggcacacccaccccccacagaggacacccccccagggaagaaaagaccccccaggaaaagagcccgaccccccgccgccgccccaagagcacacaggaaaccagaaagaccacaggacaaggaagaaagcaccaaccgaagcgccgaccgccccacccgcgccaaccacccccggcaacaacgcacacacacacacacacaccacaccgccccccccccaacaccggaacggccggcagaaagcccggggcccggccccacacagcccaggcaggcagaaaaccacaccgccaagcagcccaaggccaggaggaaccaccaccaaaggcaagaccaaaagaaaaaaaaaaggccagggagggcacacaccaacagcaccaggaagcagaggcagggaccgagaccacgacacagagcgagccaagacagacaacacacacagagaaacccgcaaagaaccaaaaaaaaaaaaaaaaaaaagccaaacccaagccccagcagaaacagcaccacgacacccgcacgggccgcaacccccaacgcaagaacacaagagaccaccaggaagagagccaaggagggcgccaaaacagagacgggcacagcgggcggaggcggggcacgaggggaaggccagccacgggaggcccacccaggcagggcaccagacgcaccagggagagagagcgagcacaacaggcacaagcaccccccgccaaccagaaggaccagacaagccgcgaggccgcaggaggcggaccggaagaaacaaacacacccccaaagcacggggggaccacagcaagcaaagaaacacaacgccgcaacagaagcccaagagaccccccccacccggacaccagccacagaacgaccggggaaaaccacaggaccaaacccacaccccagcacgcccccgagaggccaggaaaaccccgacgccagcccaagacgggcacggaagaggcaaaaagccaccccacccagccaagcggccacaagccggaggccccgcgaaacccccaaaccccgaagcaggaaccgcccgagaacgcagaccgcaaccccaacagcagagggacacagcaagcgagagcaccgacagaacgaacacaccggaacccaaaaacaagaccaaccggagaaacgaagccccaaacggggaccaaaaggacaagcgaccggccccagacaggcggcgggccagcgggggccagggccagagcagaccgggccggagccgaagccaacacgcacgaaggggcaagccacaagcgggccggaacgggacaccgcacaacccgagacccccaacaggcaacagccagaacagccacaggaagacagaaacaagagagcaagccaccaacgaaagccacagcccaccaacgagcacagaccaccaggaccgccagcaagggaaggcacacagaccacaccaggagggggggcaagcaaagagagccaggcaggaaaaagcagcaccaagaaaacacgacccaccacaggagacagcccccccaggaagcccggggcgagagagaagggaagggaagcgcccgcccacccaccgcagcagcgggcagcacgccccagcgcagacacggaggaggaacccgggaggggagccaccagagaaaggggacgcccggggagggcgaaggacagcccacacacccgcgccaccgcccgggagcagcggaacagcgccgggcccgcagccacacccccacaggaggaccccgcccccaaacacccagagaccccaaagcccacagggcacaagcaacaggaaaacaaacaaagaacccccccggg

SEQ ID NO: 681 - RNA, 17069 nt, Mus musculus
  misc_feature (6873)..(7170): n is a, c, g, or u
  misc_feature (8520)..(9461): n is a, c, g, or u
  misc_feature (10216)..(10315): n is a, c, g, or u
  misc_feature (11576)..(11675): n is a, c, g, or u
agggaggagaccccaggagaccccccccccacaagcaacagcaggaggacgaaacccaaaaaaagcgccccacagaggagcgacaggcacagcaaggccaaaccagcggcgggcgggggcacagccaacccagcaccgggaggcagagacaggcggacgagcgaggccagccggcacaaaggagccaggacaggcagggcaacggagaaacccgcgaaaaaccaaaacaacaacaacaaaaaaaaccagcgagcgaccaacaacgcaaaaacagcaaccgaagccccaagacgcggccgaggcagcggacaccaaccgcagccccgcagaacccccggcaccccaccccacaccccccgagccgcaccacgaccggaggaagaaagaagcagggcacaaaaccgccaaaacccaggagccagaacagagggcgccccaaaaggaaacgagcaggcagacaccaaaacccaaacgcagcagcacggaacggaacaaaacgagaacgccaaagacagaagaagaagaagaaaggagaagaagaaagcaagagcgcgcagagaaaggaaggcgcaggaggggcggaggaggagggagccggggaaacaaggccccaacgggaaaaacagggcgagcagggagaagcaccagagacgaaaacaacagaaaaagaagaaacagggcgaaaaaaaccaagacaaggaccccacccaacaaaggaaagaaaggcggcacaaaaaaaacagcaaaggacacagaaaacacccgggggcgaccaggccaaccaacgggagaaggccacaaaaaacagacgaaagcaaaaaaagacaaaaaaaagaacgagcgcagacacaccagaagagggcacagaccagacggagggagccaccaggggcgggagaaccaggacccggaagagcagcaggccaacgcgagccacccacagcgaaagcaaaaaaaaaagcaggggcaggggggcaaccaacccagcaccagaacaagaagccggaaaacaagccaggccacccaaggcgcagccaaaagcaacaaaaaaacaacaaacaaagggcaagaacaacggagagaggaaagaacgcaaaaaacgagacgaagaaaggcagacaaaaaacagaaacacaggggagaaaaagacccaaggccgggaaaagcgcagaagccgagaccgagccaaaccaggacccaggggagagagagagagagagagagagagagagagagagagagccaccccaccagcgcccaccagaccgcgcccagacaccaacaccaagagaaagaaacaaagaaaaaaaaaaaccagacaacacacaacacgggggccagaagccacagcggcagacacaggggcgaccgcaaagcaagacgaaggaaaggcaaccggagagagaaaagaccagccacgggaccgcgggccccccaacccagccccccccagagccccaagacccccaccgacaagcaccagccacaggccgccagcaccaacaaagccacgcaaacaggaggcaccggggcacgcaggagggggcagcagcccaagagcacccgaagaaacaaagacaagggaaccaagaggcaacgggagcacacaacgaaagaccgagggccagggaggcgcccacccaggaccgccccgcgagaaaagagccacccaaaagcacaaaggccaggaaacaacaaacaacaagcgacccccagaagccagaggaacgaacacagcgaaacgccagacagccaccaccaccacgagaggagcagaaacgaaagaacacaacggcaaaaacccgagcacacccaaagcagagccagaaacccccccccacggcccgagccagcgaacaaagcccccccaaacacgagagcaggggggggaggggcggagagaggccagcagaagagcacgaacacgacgccccagaggcgagcaaacccagcaaacacgggggcacaaccacagaagagacgagccccggggcgaagagaggacagaccacaacaaaaaaaaaaacaagccaggaggcgggacggagccaggaaaaaaaaaaaaaaaagaagaagggcaacccggaggcaggagaggcccagggcgaagcaagccagcagagggggaacacagggcccaagcccaacaccggaggagagcccgccggacaaggaggcacaagcaggccaggcgggcagggaggaggaaaggcgggcagcaaaaaccacgacccgagaaggagacgacaccaggggccgagccgaggacaccgaaaaagccccgccgcgcgcgcgaaccgagaccacacaacgagccgggacccagccaggacgaaagaaggacgaagggacgcaagagcgaagaacgggacaagacagaccgcgcaaagcacccaaaccaccgcaagggacacaggacacccgagggaaagggccaggagcgaaaggacgccgcaccacacgacggcagggaggagaggggggggaacaaacaagacaaggcaaaacgacacaacagacaagagaaagaaaagaaaaaaaggaagccagaggaaaaaacccgcaagcccagccgggccaggaaccccacacaggcacacgaacacacacaagagaaggacccagaaccacacccccagcggcacgcagcggggggggggggggggcagccaggagggcagggcccgcgaagcgggcaaaaaagcagcaagggaggccacacaacaagagacgcagggaagcaagcgcgcgcaaagggcaaggcacgcagcaggaaggcggccacccccagcccgcccagccagccgccaccccgcagcacaaccaccacacgaagaaagccccacagccacaaggcccgcagccgaagggcccccgccccagggccagacgccgacacgcgccgggaccagcacccacaaaggcgcgggaccccgggagcgcaggccaggaccacccaagaacagaacaagagcgccaaagccacaggaggcaaccggagcaagggaggccacgcgaggcccacaagaaaacgagggaaccccacacagggggaagccggccagcccgggcagaagcagaaaagccggggggggaccccgaggcgcaggaaggcccaacccagagcccacgagaggaaaggaaacgacaaagcgcagagacagcgggaggggggggggggggggggggagacagccaacaaccgcggaaaacaagcgcaaacgaagcaagcaacaccagaacagcgcgaaacgcccagcaaacaaagcaaacacagggcgacacagggcaaaacccacagcaaagcgaagcaacccggacccacggggaccacaaaggccaaagaagagaaccgaacgaagaagggaaggcgagcacaggagccggaagcacaaacaacccaaccacagccacacaagcaacgcacagcaaaggcagaagaaccaaaaccggcgacgcgcgggagcgagcagccacagaaaaaaagggaaagggcaaacaagaagggcgaaggcagcaccaacaaagagaaacaacagaaaacacacaggagaaaacgcaggcacagagaaaacaaaaggaaaaacaaagaaggaaaaccagagagaaaaccacccagaaagaaaacagcagcgccgcagaggaaaaaagacagggaacgggcaagccagcgccgggcaagggcagaaggaaagaggcgcgagacagccacgccgaaggggcagcccggaacgacacaccaagccccaacaaggccaagaggggccaggcaccagagacgaaagcaagcaacacggggcacgccgcggagagagggaaagaagaaagcgcggcggagaacgaagaacggccacccaaagagcagaggaagggacgaacaaagagaaaaacccccgccaccaccaccaaaacaaaggcacagacaccgcaagccggcccaaaacggaccggcaaggaagaggggcccaaccaggcccacacacgacagcaagagaaacggaggcgaagaagcaccccagagcgcaagggacaggcccccaggaaaccgcaccacacccccacgcaacccgcagggacgaagaacaaacagggggagggacgcacacccggagcggacccaggaggacacagccacaccccccccgggcacgagacgggcagcccagccagcagcccacaaacaaagaagagagaaaacaggcccacccccagagcaccagcccaaaagaaggcagagcccaggaagggaaaaaaaaaaaaaaaaagcacaaagcacagaagagagaacacgagcacacaacaagagcaggagcacacagcaaacacacacacaaacacacggagcaccggcgcacacgcagcacgcgagaagcaggacgcaagcacggaagcaaaacaaaaacgccaaaaaaaaaagaaaaaaaccacggaacccccaaacacaaagcaaaacagaaaaaacagcccgaccaagagagggaagacaagaagcaaggaaagaccggccccagccagaccaagacccccagaagaacggaagacaacgggggcaagacagggcgggagcccgcgccggaaccaccgagaccaggcgccgaaccagaaacgcgcccgcccccaaggcgggaaaaggggcaccaccacgccggcaaaagaaaaagcgaacaacggcaagagcacagccgaaagcaaagacgacaagaacagaggcacaggagccaagccaaagcacggcaggccaccacgaggcacaggcaaaggaaaggcacaaaagcaagggcgagaaagggagaaaagacgcacagggaagaaggacccgagaaaaacccggaaaacacaagcaaaaagacgggaaagacagaggacaagcggaacaaaaacagggaacagaacaaagaccaaagccaaagaaaacgaaccaagaaggagagaaagggcgagagggccagggccaaaacccaaggaggaagagagaaaacaaggcccgcccagcaacacacaaccacacaaacacacacacacaacacaccccacccaaaagaaagcaaaagcagcgaaaggagagcaaaagacagagcaaggcacagaagagaggaaaaagaaagagagacgggagcggggggggggagcagaggagcaggacagagacaaacagcaagcccccgggagaagaaggaggccaagggcaaagccagcggcacgcagccagggagcgcccaaagggaccgcaagggcagcacgagacccaggcggaccgggaagagccgcccagagaggccccacgcgcggagaggagagaagaagagacagcgcaaacagggaagaccggggacaaacgagccgagaacagggccgggggcccagaaggagacgcggaaagaacaggggcaaaggaacaagcgggaaccagagagccagcggagaagaccaggaaagggcggcggggcgacgaaaagcagggaaaaccagaagccaaaaaaagaaaaaaaaaccccggaaagaccccgccccaccaggaaaaagaaaaacacaccaggcccagaaagaggacaaagacggggcaggcaagccaggggagggccgcacaaaaagcaggaaggaacaacaagaaagcacagagggaccgcagagcacacggggaagcagaaaaaggccgacgcacgcccccgacgaggacaaaggaccacaacgaaacggaaggcgaaccaacgaaagagcaggagccaagaccagagaaaacacagcgaaaacaccacacagggccagagcgggcacgccagacgcaggggcggcagaacacaaaagaaaccgcaagcaaaaagggcaaaggaagcaccgcccaccgaaaagcaggccgacgccgaacgggggcacagcagcaggggaagggggccgaggaaaagggggcaggacaaccaagaaaagacaggaacggaacgggagcaaaggccaacgccacccaaacacggcggaacccccaggagggaggagcgcaccagcaccggagaccggagaccggaacaacaagccaaggagcagcaccgcaacaggcgacgagagccaggggccacgcgggacccccagccaccagaaccggaggaccaaaagagcacacagacgccaaccagagagagggcaggagaggaaaccaaggaccagggcagaagcagaagccagaaaaaggagcaagcagagagggcacaggcaccagcacgggagacagaagaggagaagaagcaaggcagccggcgaaagcgcaggccagcagggcacccagagaaaccgccaaaaaaaaaaaaaaaaaaaaaaaaaaaaacaaaagaaaagacagaagcaggacaaaacaagaaaagaaggaaacagaaagaaagaaaaaaaagcgaccaggcaggcacaaaaagcaggggcaggaccccggggcagcgcccagaggacaaccagccgagccaccaaacagccacaggcaacaaacccacagccccggcagaagaagccaacagacaacaagcgccgaggggaacggacaggccacccacagccggacaccaaagaacagcacccccaccccacaccccaggaggaaggaaacgggagcaagccgaaacagaacccccgagaaaagcacccccaccagcaaaaggaagaaaacaaaaaagcggaagaaaagaggaacagaacaaagacaaagaaaacaaaaagaccgaaaacaccaagacaccaacaaaaagagaccaaaaaaaaaaaagcaaaaacaaacaagccaaaacaaggcaaagaggaaacaaagcacaaaagaaagaaaacgccagccgaggcaaagaaagaagccagagccgggcaccgcacacaccagagcccagccaaagacaggannnnnnnnnnnnnnnnnnnnnnnnnnnnnnnnnnnnnnnnnnnnnnnnnnnnnnnnnnnnnnnnnnnnnnnnnnnnnnnnnnnnnnnnnnnnnnnnnnnnnnnnnnnnnnnnnnnnnnnnnnnnnnnnnnnnnnnnnnnnnnnnnnnnnnnnnnnnnnnnnnnnnnnnnnnnnnnnnnnnnnnnnnnnnnnnnnnnnnnnnnnnnnnnnnnnnnnnnnnnnnnnnnnnnnnnnnnnnnnnnnnnnnnnnnnnnnnnnnnnnnnnnnnnnnnnnnnnnnnnnnnnnnnnnnnnnnnnnngagggaggagagagggaaggagaagggggggacagagccccgcagagagcccgcccccgaggaccgcccggacccagcgaccacaaccagcacacagcaagaaaaagcgcaaaaagaaccagccggccagcgccaaagaacaggagacagagggaagcggcacacccccagcgaacccaccagcaccaccgacaaagcagcagaccccaaaggagaaaacaaacgaccagaaaacaaccaacacaaggccacagacccaaaaaaagaaaacagcaggcaagcaggggcaagcacagacaggagcggcccgaaccaaaccccaagcgaaagccacccggaccagcgggccgcccggccccagaaacccagccagcaaaaggagaagaaaacaccacaaaggcaggcagagagcaaaaaagacccaagacaggccccaccacccaagcaacacacccacgcaccagaagagagcccccaaaagagagacagcgccaaggagaccaccggcccagaaccaaacacagcgacacagaccggccccaggcaccgcacagccaccagacagaagcagagggagggcggcaccacaccgcacacggagaaaaccacacaacacagacagcagacagagaaaaaaaaaacacaacccggcgcccggcgcaacagaggaaggacaacggcggcggaaagcccaggcaaaaagaacgaggaaagagcaacaacgggacaaaggcaaaaggaccgcccgccccgaccaccggaaggggggaaagcagaaaacagaccacgaaagcaggggcaccgaccggcaacggagagaaggacagaagagagacggacgcgcccggacgaaagaaccccaagcgcaccgaaaagccgccccgcagccccacaaccaagcaaagccagaaccaaaccagcaaacagccaaggcagcacgggaccacaggggggagcaaaccagagcaaaggagggaaagaagacacccgaagaaaggcgaaaaacaaaaacccaaaaggaaggccccagcaacggacagaccacagcacacccagccggaaaaggcaccagaagaagaagaagaaaaggaggggcaagaaaagaaacaaaaacaaaaagaaaaaaaagaacgaaaaggagggcagggaagcaggaaagcccacaggcaaggacaagaacaaaacgaaacacccacgaacagaaggaggcagcgggcaacgaaccagaaaagccccgacaaggaacggcggaaagcaaccaccggacggccagccaggcagacgagagccggaggaaacgcgcgcccaccgaaaaacaaggagaaagaggagggggaagaaaaaaaaagnnnnnnnnnnnnnnnnnnnnnnnnnnnnnnnnnnnnnnnnnnnnnnnnnnnnnnnnnnnnnnnnnnnnnnnnnnnnnnnnnnnnnnnnnnnnnnnnnnnnnnnnnnnnnnnnnnnnnnnnnnnnnnnnnnnnnnnnnnnnnnnnnnnnnnnnnnnnnnnnnnnnnnnnnnnnnnnnnnnnnnnnnnnnnnnnnnnnnnnnnnnnnnnnnnnnnnnnnnnnnnnnnnnnnnnnnnnnnnnnnnnnnnnnnnnnnnnnnnnnnnnnnnnnnnnnnnnnnnnnnnnnnnnnnnnnnnnnnnnnnnnnnnnnnnnnnnnnnnnnnnnnnnnnnnnnnnnnnnnnnnnnnnnnnnnnnnnnnnnnnnnnnnnnnnnnnnnnnnnnnnnnnnnnnnnnnnnnnnnnnnnnnnnnnnnnnnnnnnnnnnnnnnnnnnnnnnnnnnnnnnnnnnnnnnnnnnnnnnnnnnnnnnnnnnnnnnnnnnnnnnnnnnnnnnnnnnnnnnnnnnnnnnnnnnnnnnnnnnnnnnnnnnnnnnnnnnnnnnnnnnnnnnnnnnnnnnnnnnnnnnnnnnnnnnnnnnnnnnnnnnnnnnnnnnnnnnnnnnnnnnnnnnnnnnnnnnnnnnnnnnnnnnnnnnnnnnnnnnnnnnnnnnnnnnnnnnnnnnnnnnnnnnnnnnnnnnnnnnnnnnnnnnnnnnnnnnnnnnnnnnnnnnnnnnnnnnnnnnnnnnnnnnnnnnnnnnnnnnnnnnnnnnnnnnnnnnnnnnnnnnnnnnnnnnnnnnnnnnnnnnnnnnnnnnnnnnnnnnnnnnnnnnnnnnnnnnnnnnnnnnnnnnnnnnnnnnnnnnnnnnnnnnnnnnnnnnnnnnnnnnnnnnnnnnnnnnnnnnnnnnnnnnnnnnnnnnnnnnnnnnnnnnnnnnnnnnnnnnnnnnnnnnnnnnnnnnnnnnnnnnaaaaaaaaaaaaaaagcagaaacagcaagaaacacgagaaggaaagggcagaccaaaccgaggacacaacacacaggaccgaaaaacaaggcgcacgacccggcaaaccgcaagacgggaacaggaacagcggcaaagaggcggcggggaagaaggaagcaaaagagaagaggaagcgagaagccaaacaaaagacggacaggacacggaaacagcagagaagaggagaaaaaagcgaaccgaccagcaccaaaggaagaacgccggaacaagacaaacgagagaaaagcagcaggaagggggcacgggagaaagaaaacaaacaaaagacaaagaagccccgcaccgggagacccaccagcgacacaaagcccacgcacggcaggaaaggcccgccgaccccgccaagcgaggaaaaccgaccaaccagaaaacagcccaccagcccgccggaagagacccccccaaacgcccgcccgaaaaaacaggagagccgagcacagaggcagagagaggcgcacgcggccggccccagaagagaacagggcacccgacaaacgggggaggcgacgacacagggggaaagaaacaggaagccccccaagcaaaccagggacgacacacccgggcacagggagaacacggcagaaacacgagaaaggaaaggggaaaggcggagggaaggaagccaaaaggaaggacacgcaccggacagagccagaaggacgaccccaccaaagggaagggaaagaggnnnnnnnnnnnnnnnnnnnnnnnnnnnnnnnnnnnnnnnnnnnnnnnnnnnnnnnnnnnnnnnnnnnnnnnnnnnnnnnnnnnnnnnnnnnnnnnnnnnnacgcccccacgaccaccaggcagaagaaaccgccgacaagcacagaggggacggggaggcggggaggccaggggaaagcaagggagaggacccaagccagccagcaccacgacagaggcaggggcagcgagcaagaagacagggaggagacggggaacggagacaggaacccggaaaccccggccagccagaaaacgaaaccaacagccaggcaggagaggcccgccaaaaacaagagaaaaaaaaaaagaggaagacacacaaaaacccagcccagaacacacacagcacacacggagaaaacgcaggaagcaggccacaacaaacgagggggggcgcaaggcccagcccgcccgcagggcggcccgacgggggcccccagaaacagccaaagcaagcaccaccaaaaaaaagaacccaggaagccacggacggaccgaccgaaaaaagaacaagggcaggggacaacacagagaaacaaagagccgaaggaagaacccaggagccagcgacacgccaaaggaaaagacgcaacaaagcccccaagaacacagccagcaacccccaagaaggcagggccagcaaggagcacaagacgcagccaaggcaaagagcgaagccgaagccaggaacagcagggaacaggaaccaaagagccccacagaaggacaagacaaaaagagaagaaaaaaaaaaaaaaaaacggcaggacaaaagggaaccccgggcccaacaaaccagacggcaaaaagccgacagaaaacaaccaagggggaaagggaggcggagccgggagccacgagaagaggcaaggcaggggccgagcacggagcacaccaaggacaaagagaacacacagcagcacccacgccggacccgccgcacacaacccaggacagcccagagaaaggcaccaccccgaagcagggaccccagcaacagaccacccccagacaccgccggccagccaacaagcaaccccggacaccccccaggacagcaggcagacgaccaaagcaacccaccccagaaacaaaacaaacaggcaaggcaccaacccaacaaaccccaaacaagagggagaaaaaagggcacaaaaaccgacccagcagcgcaaagccacaccagaaacaggaacacaccagaaaaggcagaccggacaaaccaccccaacccagaagcacccagcaaaaagggaaggccagggcaggaaaggaaccaaaccacgagcagagccccaaaaccccaaccacagccaggnnnnnnnnnnnnnnnnnnnnnnnnnnnnnnnnnnnnnnnnnnnnnnnnnnnnnnnnnnnnnnnnnnnnnnnnnnnnnnnnnnnnnnnnnnnnnnnnnnnncccccaccccccaccccccacccccacccgcccaccccacagaccccccacccaggcccaagcccccgaaggagggcaccccacggaagccacaccagaagcccgccaagggggagcaggggggggccacagcgggagcgccgaagggcacaaagagccccacccccccaccgagaaacaccaggcgggcggcaccacacccccaccgcaccagcccacagcacaagccccaccaaggacacagccggccgccaacccaaaagcaagaggccaggcagcgaccaaccaaaggacagaacaagcaagccgcagacgcaaacgagcaggaggaccgaaccagcgagccaaagcagccaccagcaaagggagaggcaccgaccagccgggggagagacaacggagcggggagggagaccaagccaaccgaggcacacagaaggaccggacccaacagacaaagacgcggcaggacagaggaaaaaaagaaacaaaccgggcaggggggacgccaaccgaggcgggaggcagaggcaggcagacgagcaaggccagccggcacagaggagccaggacagccaggggaacggagaaacccgccgaaccccccaccccccaaaaaagaaacaaggcacaacagacggaccacaaagcaaaaagccaagcacacgaacaaaacaaaagacacggcagggaacagcaaagaagaagacgaacagaaacacacaccgggaggaggccaagggccagcacaaaggccagaggcacaagaagaccgaaaaagggacccagacaacacccaggccaaccaacacaagagcgcacccggcaccagccccaaccaaaagagacagcagcaagacccaggacaaagggagggcgaaaaaaccacagacgaccagcaggacgcacggagacggccacgccccgccagacccaaggcggagacagggccggccagccagcggcacaggaccaagcgagccacgcagccacaagggagcaaagcacaaagcaaggcaggagcccagcacgaaacccggagcggggcagggggacaagacaaaacaccaagaaaggggagagaccaagagcggacgccaagcagacgccacccccaacacgacgggccccgacacagacacaaccccagggaaacaacagagacgcggaggaggaccaacagccaacaaaacccagaaaacagaaaaacagaaagcaggagggcagcaggcgacggacaggaagacccccacccaaacaaacaacagaggaacagaacaggagccggggaacacaacggggggagcggccgacagcccccggagaggacggcacagaacgaccaccacacaggagcagacagaaagcaacaggggccaccgaaaacccagccgcgcgcaggcacgagacagcaagggaacgcaaaccaacgagagcacagacgccgaagaccagcaaagcaaccacaaaaaaccccagcaaaagaagaccgcacgcacccggcccgccacgacacaaaagcagaaggggagagcgcagcagcgaagcagagccgcacggacaaggaaaccaggcccgcaggagacaaaacccccccgaaacagcacaagaaaaagagacaagagggccaaaacaccacaaacaagcacaacagaagcaaaagcccagggaagaacaaagggagcgagaagcccgaacgaagacaagaccacgcaagaaagaggaaaggacacagccagcgacacagaggaaaacaggcgaaaaacagagggcagaacaacaccaagaacaccaaagcagggcgaacggggggccaagcagaaacggaccaaagggccggcacggaagaggccagaggaagcacacccggaacagaaacaaacagcggagccaccgcacggcagggaaacaaaccggggccgaacaacagcaaggccgacgcgagcccaccccagccccacggcaacaagaacagggagcaaggcaagagaagcagggggggcggcccgaagagccacaggagagccacggaagcagagaaaaggggaacaagaccaggaaagcggcagacagacccagacgaagaggaacaggaagacgccgaaacgggcgcaaggagaaaaaaacgcgccgggaaacacgagaaaagagccaccacagaaaaaggaggagcacgcgagccacagcagacacccacaaagaaaggaaaacaacagaccagacacaacagaaaagcaaaacaaagaaaaaaagagggaggcaaaaagaagcaggcccaacaaaggacaagaaagaaagggagaaagagaacacgcccacagacaccggcaacacccccacaaaacgagcaaacaaaaaagaaagcgccacaaagccaaaagcgggggggggggagccaaaaaaaacacaaagaaacgccagaggagaagaacggagaaaagggccaccaagaagcacagaccacaaaaacaacacacagcagaggaagccggaggaagggcagaaagaggaacccccaacccagaccggagcagagaaagcaaaaggcaggccaggggcgcccagaagaaaaaaaaggaaaggccagcgggaaacaacccacaacccccaccaagacccagagacgaagcgaagaaaacaagaagaaagacaaccaaagcagcaaacgaaccaaaaaaaaaagagggagagaaaaggggccaggggggagcggacgcgcaagcacagaccccaagaccggaaggcgcacggagcgaggaccagagagcgagcacccagaacagacaagcagcaggaacacaggaaccacccaaacaaaacaaacaaccagaacgaaggcgggcgaaaagcgagagcaagccgcggacccagacacaaagagaaagagacgaaagcgcaagccgcccaaaggcagcagaagacaacaaaagaaaagcaaaacgggagagcaccggagcggaggggaggggggagaggcacacagcacaggaggccaaaggccacacaagaacagccccacgcggagggaggccccacgaacccgggacacgggcgacggcgcccagcaagcaagaccgccgcacgccccgccccccccccccgccagcccgggacacgcaagcacaaccacacccagcaccacacaggcggggacgaaccaggcccccaggcggcacaggcacacgacagagcccaccccgcagcaaagcagcacaacaggggaaacacaaacagaggaacaagacaacaccaaacgcaacacccggaggacaaagccagccaaacacacaagaaggaggaggaaagccaaggaaagaaaaaacgcagagccaccagaaaaaaacaacacgacgcgaggcaagccagaggggcagaaacacaagcaaacaggaaaaaagaaacacacaagccacacagaagagacaacggccacggaggaccgaggcaccaagggcggcaggagcaaagacccacgacacagaaccggcggaagaacaacgggaagccccagaacccagggccacagcaaaggccccgcgggagccaaggagaaacacagacggagaaagaaggaggggagaaggcggagccacggacgggccagcaaaaaacacgcccacacgccaaaaaaggaggagcgacagaagagaaaaaagacgggccccccccccccccccccccccccccccccccccccccccccccccccccccccccccccccccccccccccccccccccccccccccccccccccccccccccccccaaacacgaccaaaaaccggaaaacggaaagcgaaacaacccccgccccgcagacaagcagcagccccgacgaaccacccggaaggcgaccaagaggcccaaaggggacccgcacgccccaagggcgaaacacacagcagccagccggaaccacggggggggggaagagacaaacaaagcccaggcggccagaaccacagagagcgagaccccaggccgacccgccggaccgagcaggagcaacaccaaagcagcacacacggcaaacaacccacacagagacaaaaagagaggccgaaaaaaagaaagagaaaagcaagcgaaggagcgcagacaaggagcaaaaacaggacgaaaaagaaccaggaggcaaaaagacaccgaaccaaggaacagccagaggaccacgagcgacaccacaaccagacaagaacaaggagcagggcgcgagccgagcacgggccagaaaaagaagacggagagacaaggcaagaagagcgcgcaccacgaacaaaacaggaggcgacaaccaaagacaaagccagaaaaacgaggacgaagggaaaggcaaaggcacgggaagaaacaagagaccacaaaaaggcaagagggaggccaggcggaacgacaccgggacaccacccggcgccgggaacaagaaacaccagccacccagcccaccccaacacacaacgcagagcccccgacacgccaggaagcccacgcgccagccaaaacacccgccccagagaaaggagccgcagggcccgagccagggcaaggagcaagagcgaagccaggcaacgcaagcgcacacagacacccagacagacaccgcccagagaacccaaaggaaccgaggcagaccgaacgagacgaacaccgacccggcagcggcaaaaaggcgagagggccacagaaagcccagaccagcacacacagaaggccgccggcaacggccgggccggggggagccggggccggacagacaaacccacagagccggacaacaccaaaagcaagacgaagccaacagcacaaggcggaggaacaaacggaaagacgagggagggggaaaaaagaggcaacaggggaaggcaaggaaaacagcccaaggccccgggaaggcaacaccaggaaacgcacagaaagcagggcacacaaaccggaaaccaagccaacccgcaaaccccagaccaaagaaaaaccacaaggcaaaaggagaacacaaaacggagggggggggaggagggcagacacggacagggcccgaggagccagaggcagacgcccaagcgagacaggcgagagccggacaaaagaccggcccacaaaaacaacacagccaaccgagcgcgccagccccaagcaccacgaaaagccagaaggcggagggggggcaggacaaagggcaaggccccaagccaccagacgagcacccgacccgaaccagaaccccaagccacggagaaaaacaaaaaaacaaaaaaagcaaaaaccaaaaccaacaaaacaaaaaaagagcaaggacaaaagaacaggagagaacaaaaggaaccaagagccggagccacccaaaggagacaaagaccgagagagcagacagcagaccacgcaagcgggcaa

SEQ ID NO: 682 - RNA, 1816 nt, Mus musculus
cagccaaggagaaaaaaggagccagggggggaccgggaccaggccaagggaacccgagaaaacaccagcaacacacagcaagaggaggggagaggagaggaagagaacaagaggagagaagaagacaaggagaggaggagagcacagagagagagaaagacagagagacagagggagacaaagagacagagagaaacacagagaggggcgggcaaagacgagagggggagacagagagcagagagacagggacagagagagagagaacgggagaacggagaaggcaaagggacaaagagagagcggaggcggggccaaccacagacaccggcagcagccgcgcaggcccgagcaggcagggaacccgaacaacagagaggccaaaggggaccccggggaccaggcaagccggccacggagagcgagagccggggagaggagaacgccgacaggaggaagaggaggcccgcagacagccacacgagcggaaaggcacacccaggcgccacgggaccagcccggccccggagccccaccaccaccggaaagagggagagacccggacgggaagaaaaccgagccaagcaaacagcaaagagcagcaaacaacacaccggagcaaagcagaaaggcgaaaaagcaagcaaaccaaaacgcaagcgcggaccagaaaacccacgaggcccaagaccaccccaaacacccacacgcagagcgccggccccaaagcacagagcaaaaacgcggcagaccaacagcacgaccgcaaggagagagggggcggacgcggccggggaagagccgagagagaaagccgcaccaagcgcggacgccccaccccccggggccggaacacacaccagcgagccagggcaacaggcacacccggcccccccccacggaaggacgcgggagccccgccgccccccggaaaggaaaggacaggggccccaaggccccaaagaccgagaagagggaaaacggggcagagacaggacaggccagacaaacagcaccgccggacccggcacggggcggacccaagcgagccagaaaaaccgcggcagaccaagaaagacggggggcgacagccccgccacgccgggcgaggagaacccagcaggaagaaggggacaaggagcaggccacggaccacccacagccagagcagggaggagccagggaaaacagaccggcggacacacgaaaccccggaaaaccgaaggaagcagccaaaaccgagagggaaaaaccaccaggcaacgaacgaggaaaacacaggaacggcgcgccagcagacagcaggacaagaacacacccacaagagacgcaaggacacgcacaggacgagggaggaggggacagaccagaaaacggcgccaggaagagaccgggggcagaggcggcgaggaccagaaaggccaaggccgaccgggaagccagaccagaaccccacaccacggcagacacacgcaaacacacccgcgggcggcgcgcaggaaaacgaagagagaacaggagcgaagcgaaagaccccgcggcccaggggacgacgcggggggcgcaggcggaccgacccaggagcaaccagggggcgggccaaaggaaccaggaaagggaggcaaggagacaaaaagcagggaagagaagaggagggcggaggacagaggcagagcggaggaaccccacaaggccaggagaccaggacggcccgccgacagccagccgggaagaggaaagccaaaaaaggaccagaaaaaaaaaaaggccacaaagggcagccagggcgccggggggaacaaaaccaaggcacaga

SEQ ID NO: 683 - RNA, 15040 nt, Mus musculus
caaacaagagccaaagagacgcaccaggcgggcacccgaccggccaccagccagcccgcaccacccacagcccgccccaaggaagcacccgaagcccgaccagacaccagggccgcagccggggcaccaagccccccagagcgccccgggcccagacagcccggaagcacgcaaccacggagcccacggaaggagagagagaagaaggagcgggaggcaaccccagggcgcagaacgggccaaaacccggaaacaaaagcaggggggagaaaagcggaacgaagcagggagaaccgacccacaaagcaacgagagaagagagaccccggccggaggcaagcaggagagacaagccagcaacagagaggaaccccgagacggagaacaaagggcaggagaaaccaacgggaacaaggagcgagacccaggcccaaggaagcagagcagagaagagagaggaagggccccagccgaacagaccagaagaccaaacaaggacccaaaaaccaccgagagaccacggcccggcacggccgagcccagcccagccccccccgagaaagcccgagcgacagccagagacaggaaggagcagaaaccaaaaccaggggaccagcacagaaggggaggggaaagcaccccaccaaacacgccacaggcggggcgccgagcacagcgaccacagccgcggaagcccccaacaccgagaaaaagccacgcaacagacagcagcgggaggagcaggggccacggacagaccaaacagccaggacgagcaagcggcggcccagggagccgggccgccaggcccacagcaccaggcaagcaaggaagaggcaggagaccacgcaagaagacagacccgggggcagagcaacagagaggaaaacacggacgagccaagccgacagccccggcccagcacaaacccacacgcccggcagaagaaaaagaagacgccccacccgaaacgagccacccacacagagcagaccccccccaacccccaaaggaaaccccaagagaggggaagggagcccagggcagagggccaaggaaaacgagcagaaaagcaaaggaaaccgaaggaagcaaaaaagaaaaaagggcggggagggccagccagaaagaggcgacaaggaaagggcaaacagaccccaggaccaacagaggaacagaaccacaaggggaacagaaccacacagggggacaggggccaccgaacccaagaccccgggaaagagggaggcagaaacaggagaacccagaagccacaggcagcagcccgaacaacaggggcaagagaccgcccccagggagaaaggccagggaagagcgcacgccccagaggaccagagggccccagcagccaacgaggggcaacacagcgaacccaaaccgggcccgagagccccgacgggccacgcacacagcacaacagaacacaaagcaacacagcacacacagcacacagcacacaagcacacacagcacaggcacacacacacaacaacacacgcacacagacacacagacacacacacacacacacacaacgacacaggccagggcaagcacacacaaaaccaagagagagagcccggaaccaagaggcgaccggcgcgaggcgaggccgcccccgagccaggcggacaccgcccggccggacggggccagcgcgcggcccgcaaaggggcgcccagcggccggccccgccgcccagaagcgccggccggcgcacccccaccgcagacaaccaagcgcggagcccggaaccaagagagagagaaggagagagagagagagagacagacagacagacagacagacagagacagagcaagccagagagagagagaccgaaagagagagagagagaccccacaagcaaacggagaggagaacgagcaagcggcgcacagcacaggcacaccacaacacacacagaaggcagccaccacccacacacaaacaaaacaaacacaagcagacaagagaaaaaaaagaaaaaaaaagcgaaaagcaaaaaaagcccgaaaaggagggagaccaaaaggaaagcaaaagaccagacacgcggggcagggccgcacaggcagacagacacacacagaaagcacacagcagaacaaaaaacgaacagccaccacacaaccagccgccgaagaagggaggagcccaagcaggcgggagcccccgaccgagaggcaaaagggagcgagccaaaaacagcgcaccccgcagagcagaaccgccgccgaaacacgccaaacccgacaggaaaaagcgaaaaaaaagcccagcacgaaaaaaggcaccagacaacaaaacagaagccagcaaacaaccacacaaccacaaagcagggcccaaagcgaaagcgagaagcaggcgccaggcccacacgccccgccaagaaagagagaggggaaggggggggaaaccccccgggagccacagaacagccaacacccgggcaggacacgggaaacaggcagaacaaaaaacaaccggcaggcgaaagaccgcccgcccccccccgccaacagcacggagcagagcaaccccccgccaaacaaaggcacaccccagaagaagaaagcacacacgcgaagccgccacccggggagggaccgagggcaccccaccccgcgggaagccacgggaccggaacaagccaagaaagcggcgcagaaagcaaaaaagagcgcagaagacacaaagcgcacccagaacagcagggccagagggaaggaaggcggccccgaaacgacaggaggccgcccagaacaaggagggggaagcggaaagagaagcccaggcggcaagggaacccggcgcccgggcccagaagggcgccacacaacacaaggcccgcccccggcccccggccaccaaggcagaaggacagggccccgcgccccccacagaccagccacgacgacacagccgcagaacaccaaccgacagccggcggccacccagaaagggcaaggggagcaccgccccccccccgagacaaagcccggaagccccaggcggcccgagacgggcaacaccgggcccggaaggcagaccccagcaagcgcgccaagacaccagggacacgcagggccgagagccccgcagccaacgagagcagaagcacgcaggggagggcagccgacacccgccccgaacaggagccggccggagcacacggggaagggacgcggggacccaggcagagcggcccccacgaggagcacaagccgcgcgcaaccggaaggggcccagaaggaagcagcgacccacagggcgcccccaggccccagaaagcccaccccacgcagagccggacccaggcggcgaagcgggcaggagcaaaagaaaagagaggcgggaggggggagacagcagcggcaaaggcaaagcagccacgacagacccccaaaagcggaacacaggcgcaggaaagggcggaaacacacacaggcacccacagacacacaggcgaaacacacacaacaaccaggagcacgaacacacaagcccaagccgaaaaccgacaacacaaaacacaccaacagcacacacacaaaccaaacaaagccccacagcaagcaacacagcaaacaggcgcacgacacacacaagccccaacggcaaagccggaaaacacaacacacgcagcccacacacacaaaccaaacaaagacccacaccggcacacagcaacgcaggacagacaccagacacaaaccacagcagcacacacggcacaggcacacgagaaagacaccagcacaaacagccccacaccacgcacacagcaggaaccaaacacacaccaccgccacccaacacacaaaacaaccagaacagacaagcacacgacaagaaaagcgaggacagagcccacacgggcacaaaggccacacacaaggccacaccagcacacagagagagacacccccacagcccaaacaaaggccaccacagaccccacccaggccggagaacaaacaaacccccagagcagaacacacccaggaaccccaccacaagcaaaggggcagcgaggagcgaggccgaggcaaaagcaccaaccggccaaaccaccccaagagaaacagggaagcccacccacagcgggggaagcgcacgagcaacagggccagccagaggcagcagggggccaggaaaaacccggccagccgcgccccgcagccaggcggaaaggggagaagaggcaggaagagagcaagaaaagaccggccccggcagacagggcggggggcccgacaccccaaagagcgccgagggagcggggagggagcgggggaaagggaagcacagagggacccgccagagcagcccgcccgaaccacacggaaaagggagcggagggaagaggggggggacgcaagaaggggggaggggggggccccgccagaaaggggggggaggggcaggcgaggcagaggaagaaagagcaggccgagagcggagggcgaaaaggaaaaaggcacaacacaacgcccccggcacaggggcaccccaaggaaacaggaaccacaggaagaggcagcgaaaagaaagcccaacagaagaccaccacggccacagcagcaaaaagcgacaaagagcaagaccaacaaaagccggcaaaaggagaaggccgggggaaagccgagcgcagcggcagaagccgagcgcccccccccacgccccccccccccccccccccccccccccccccccgagcaaaggccaaacgaaagccccccgccccacaaaacgcaaacaggaaggggagggacaccgccgagcagaaaaaaaaagacaacaaaaaagccagcaacgaaacacggaaaccaaaagaaaggacaccggcacacgggcccaccgaagcccgaggcaaccgaggaaaagggggggagagaccacagcaccccaaacaaaccagccccaagggggaaacaaaccagaagagcagaggggaccgggcaccggcgggagaacggcggaggccaccccgggcccggccaagcagacccacccccggaccagggccaggcggacccaagccccacccacgaagggggaagccagccaagacacccaagccgacacggagagaacaaaggcgaggggagcgagacaggcccgagccccaccgagggacccgcacaccacaaacgggccaccgcacccagcaagcagaggggcaacggggggacaccagcggcggggcccaaagacacccaggacgccccaagcaaccaagagcacagcccccaagccacacgcccggcgcggaaagggcggccccaccccagcgacacccgacaagcaagccagaagcagcccaccagccggcagggaaccgccaggagggggcagagaagagcaagacagccaaaccccagggacagcccaccagccagggaggccggccccccagcaccgcaacccaggcaaacacccagagacaccaaccgcccgggacccacccccaaccgggaacaccgcaaagcccccaacagggagacacccaaaacaccgaaggcaggccacgccagccggagccggagcccgggcagcccgacggagcgggggaggaagacccggaagaacggaacaacgcacagaccaaaagacaggacacagcaaaaaaacgaacccaaccaaacaaggaagagaagagccagaggacccaacggaaggccaccaagacgcaggaaaacacacacgcgaaagaggagggaccgcaacccaaagcccccccccccccccccccccccccccccccccccccccccacccaccccccccccgcccccccccaagaaaagcccaagcaaggcaaaagaacggagacagacaagccaacaagggggggcccagggggggggggacagaccgaacgagcaaggagaacgaacacccaagcagggcagccaggcggcagcagccaagccacggggccggcggggcggcccagccccaaggcgaaccacgaaccccacccgacaaaaagcccagcacagccgaaagcacgcagaagaaagaacccaaagcagaaagaagaccaccagcaccaaggagggagagaaaacagcgcacaaacgaagaaagcagcagagcacgcaccggaacacgcagcggaccggccaagaaaaaaccaaaggagaaaaaaaaaaagcgaaaaacaggacaaaggagggaaaaaaacaaagcaagcccacgcagcggcaaaaaccggggccccgaagcagcacacagggcacccaagggacacggcgccaaggccaccacggacggaggggggaagagcccagcgccgaggcagaaggcacggggaacccagacccacgccaccgaccagcaccaccacaggcggggagggaccccggaagggaacgccaaaaccagaaggaggcagagcacagcccccgcgcaaacccaaaccaaagagccaaggagccgaacgaggccagaccgggagacggagacaaggcagccaagacgggaggggagcccggggccagacccaaccaagggggaaagagggggcggccagaccacgaccccaggcacccccagccaacagcgccaaaacacacacacacacacacacacacacacacacacacacacacacacacaacaaaccggaggggcaacaccggggcaaaaaaaaaggaaacaagcagaagggaaaccagacacaaaaggaaaggagaccaacagcaacaaagcaaaacacccccaacccacaaccggccaccccacccccacaacccgcccacccccaaccaaggccacaggccacagggaggagcaccacaaacacaccagcccaaggacccacacgagaaaaacgaccgcccaagaacgcacgcagccccagagaggggaggccacacagcgacgcccggaaaggccggcaggaacaacagcgcgacccagagaaacaaccaacacgccagaagacaccgccaacccccaacgccaaagcccccccaaggcccggagggcaggagcagggggagagagagagagagagagagagagagagagagagagagagagagagagagagagagagagagagagagagagaacagagcccaggggcgaaaacccacagacaagcacgcacaccaacggaacgccaacccaccacgcaaaaagcaaccaggagaagcggggacacaccgaccgggaaagagaaaaaagagggcaggaaagcaaggagcaaaaaagaaggcacccccaacaagggacggacaagaaagaccagacacaggcccggaaacgaccaagacaacacaagcagggcaccccaaacccagccacaaaccaacggcacacccgaagcaaaagaagggccacacgagagacaagggacaccgaccagcaaccgcacaggaccagagcacggaagaccaacaggaggaaaagcggcagaccaaggaccaccccggggcaaagaagggacaggaaccccaaggcaaccaaccaagaacaagaccagagcccggcccggggaaccagaaccagacaaccaaaggggaaggcagcaaggacccaggggaaagggaaacggagggagaaggagagaaggcagaaagaggggggagaagaaaaaacacaaagaggaaaaggccacgaacacgaaaacacccacagacacacacacacacacacacacacacacacacacacacacacacacacacaacagcaacaaacccgcagagaagccacccaggaaaacccacccagaagccaagggcaaaaaagcacagagccagggcagaacaaacccaacagcgaaaggaggacagaggaaaccaaagacgacaaagcccagggaaaggcacccagcgaccaagccaggacggggcgaagggaaggcgcggcacgcgcagaacgggccgacacacaacccggaggcgccaacaaaacacagccagccccaacccggagaagggaaaaggaaaccaaggaaggcagggcgaaaaccaggacccgacggccagaacagaagagggggcagccaaccaaacagccagaggggaagggaagccacaaggggagaccgccgaaaggcaagaggaccagcaacggagcacagccaggagccagacagaagcaggacagggccaccgggcggcggcacaaagagaaaggacaggggcgcagaggggacagaccgaaaagcgaagaaggagagcagcaggaagggaagaaagcagaaagaccagcaaaaaggccccggcaaggaaggaaagccccggggccccggagaccgaagagcaaggaaacaaccacaggcccaacggggccagcgcaagggccgcacgcacgggcagacccagcaaagccaggccgaccaaagccggaaacccacgcgaagagaaaagaaagaaggggaccagacgggaagcccgacaagggcccagggcgggagccggggaaagagcaccacgccggcagggacacccagcaaaaagcagaggaaccgggccaagaggaaagccaaaaaacccagccgaagcacacagaaccaagacccccccgagccaaacgaaccaccgaggcgaacacagaccaagacggaaaagaaacaagcaagccaaaacggcgagaggagagagcaaggaggagaaaggagaccgccaaccaggaaaaggcaacaaaccagacgcagcagagccagaacaaaggggaccagaaacgagcaccacacccgagcaaggaagcaagggccgaggggcagaggagccccaacagcagggcggaccccaggcgggggcgagggagaagggggccagcccagcaggagaacgggagcacgggagaaagccggggcagacagcccaaccagaaacggagggggcggcaggagcccggcccacacccaccacagaacaaaagagggaaacaaaaaaggagagaaaagagacacaacagacgacggccacgaaaaggaggacccccaccccacccacaaagcgcccccaccccaagccaccccccccaccggcggcccgggcaacggcccaggcgagcgcccccccccccccagaaccaacaccccccaccaaccaagacagggcaggggacgcaaaaaaagcacccacccagccaaaggagaaagcccaaacccaccaccaaccaagcccacaagcggaaaggaacacccccaggcagaaagccaaaaaacgggaaaagcgaaaccaaagagaggaagcaggacagaagaaaaaaaaaaaagaaaggaccaccaacacacacacaaggaacaggcccccaaccacagagaccaagggggcacaggcagaacacggaaagacagaacggagaggcaaagacaacgaaaaagcgcaaaagcgacaagaaccagggaaccaggcagggaagacgcaagagcaaacaggggaaaaaacaacgaaacaggaccaaaccccaaaacaaccacgaaagacagcaaaaagaccaaaaaccccccgaaaacgagcaaagaaaacaaaaccgaagcagaaaaccaaccaggagacaaaaaaaggcaagccccagaaggcccaaaaagggggccaccacaccaaggcacaacaggggccccccacgcggaggcacagggaaccgaggcgaggccaccaagcgaagaaccaaagccccaaacccaaggaaacggggaagaaggggcccgccacccaaccccagcacaaacaccacgagaaacagaacccaccgaggcccgaacacggcaggagagcggggacaagcccagcacaaaggacaaaggcacagcacagagaaggagaaagcgagaggaaacaaagggacgccgccccaaaagcaggggggagaacggcccaggagcagaggcccgaccaagacacaacaagaccagccagccccagacgcaaaagaaaaaaggagcaaaaccgacaaggaagaagcaagcgggaaaaaaagagcggagagacacaagccagaaaaaaccagaaacagagaccacgggggaaaaaaaacccgaggcaagcaggcaagcaacaagaaaaacaaacaaaagaaaaaaaaaaaaaaaaaaaaaaaaaccagacagcagcaaagggagccaacaggagaaaaacgggagcgcacagaaaaacacacaagagaagaaacaaagcaaccaggcaggcccaacaccacacgggggagaaggccaaccccgagcagggaaggaagacccacaagacagaaggaaccaaggagggagcgcacagaaggcagaagaaacgcgacagacagaaaaccgcccagccacagcaaggcgggaaggccgcaaacagcagaacaggagacgccaggggacggggcaaaggagggcgagggacagcagaaaggggcccaggacaaaggaaagcaccagaagcggaagcgagggcccgcgggcggagcaccgcccggccgcagggagaaccacagaaaagaaacgccacagaccaacggaaccacggcccacacaccggcacggcccgaaggccagcacgcagcccccccaagcaaaaccccaagaacagaacaaaaaaaaaaccgcgcggagcagggaacacagccggggacgggacgggggagcagaggcagagacaaaaaccaaaaggaccgacagagaagccagacaaagcccggcacgcacaaacgcaccagacagagcagcagcccggagacgcccacagagcccagagcgagggaagaccggcacgggaaacggagagagacccagaaaagaaccaagcaggaccagaacggcaccacccgacgacggggggagcagagacgagaaaaacggggagacaagcagcccggcgagacggaggggaaagaccggggaccccccaaacagccaaaaaacagggccgaggccagagaggaggaagaccgaagacagaaaagagcaaacaaacggggcgaaagcagcaggaaagaaccaaaaaaaaggagagagaaaaggggagaaacaaggggaagcaccaaccagagcaaaggcaggcgcagggacacaaacgcaaaaacaaccaggcagaaccaggagcagagcgaaagcacacaagcccgccccagacaccggaaacgccagaaaaacccccagccggccagaccacacaggggccagagccgggggccagacaccacgggcagacgccagcaaggaccgggccaacccgcgagagcgagccaaccaaaagaaagcggcgaagaccaaaaggcagaaacaagagacccacagcaagccccccagaagccaaagccacaaaggccacgcccacaaggccaccgagccccgagccccaggaaggcgggccccagcggcaccacaggggcaaaggacgggccaagccgcccgagaggccggcgaggagagaagggagcgaggagaaagagacaagagagggggcgggggaagcacgcaccggggaaaaaacccaggaaaacagaggggaggaaaggcaccccgggcccgagagagcggaggagagggaaaaacccagaggagcagggaagaagcaccaaagaggcaagccaggcaccgaccacagagggaaagcggggaaaccgaagagacggaggaagaacagcccgcagaccaaagcgaagaggaagaaaggaaaagaagcaagcaaacaaaaaagcaggcggagcgcagaggagaaaaacgcagggaaccccccgcccaggaagacccccagccgggacgcgcgcacccaagaccacggacagacgagccaccccagcccccaaaagaaaaccggcagcacaagcccaggccaccgacccaaaagggacaagggccaagggccgcaaggcaagggagcaaagccaaggggcaaaggcgcagagaaaacaaggcaaaggggcgccacccgaaaggaacaaaccgcagagcacacggaccaggcacaaaagggagcagagagaaccggagagcaccgcagagaacaaaagcaaacggccggaacgaggacaggacaacccacaacagaggccgccgccagaggagcagcccagacaaggcaacacgacggagcacaaaaaccaagccaagggcaaagggggccagggaaaaaaaccacccgaaagcagaagaccgcgaaccccagcacccacaaaaaagacagccagcacagccacaccccaacggggagagaccagcagacccgagagccgcggccagccagccagaggagaagcaacccagcaggagacacgccaaagaaaaggggagagccaaaaacaggaacggaggcgcagcccagcaagcagggcccccagcaggaaaacacacacacacacacacacacacacacacacacacacacacacacacacaaacaaccccacaaacaacacacaaaaccagagcagcccaaaggcccgaagaccaggcgcggcccccaaggaaggaacccggagagaggggagagcccaacaggcaggcccacacagagccacgcaggaccacaccacagccaaacacgccacgcaagagcaccaccagaagggaacgagcaggcgggagagaagagaaaaaggaagccaaaagccaggcagccagggacacagaagagcaacggggcaagggacagagaacagaaaaaagaagcgaacaagcggacccaccccccgggaaagaaagcgccaacagcaggagcaaagggaaaggaagggaaggcccacaaggacagcaaggaggaaccaagaccggacaccgacaaccgcaaaacagccacaaggacagacgaacaaacgccacaccgccgggggccaggggggccccaaaaaaagcccgaagaaaacaaaagagagggagaaaagagggaacgaaaccgaaagaaacagaagggggcaccacgaaagaacacgaaagcaaacagaaaagacaaagcccagaagcgccccagaagaaagaccacgcagacaaagcgcagcagagcccaggccaaaagaaaagcgcacacagcaaccaaccacaacaacccaaacccgacccgccccaagaagaaccaggagccccccaacggcaggggagaccaggaaccgcaacgaccaccccaggcaagaaacaacgacgagacaaacgccacgaaagagggggagcagaaagaccagggggaggaggaggcaggcaagagcaggaaacagccagaaagacagcaccagggcacagaaacccccaggcgccgaaggacgaacacaaaaaaacgaagcagaaaagcaaagaagaggagcaaagaaacagaggaagaagaaaggggaacaggaaaaaggaagagagaggagaggaaggaaggaaggagagaggaggggaaggagagaaagagggagaggaagggagagaaggaaggagagaggagaggaagggggaaaaacaaagagcccgcggaaaacagagaaaccaacaaaaaaagacaccaaaaggcgggagaagagacacaacccaaagcagaggcgaacaaaaacaacgagggccaaggaaggggggagaccacagaacacagcgccaaacaaaacaacaaacaaaaagaagcagacagggaaggcacaggaacggcagcaaagaacaagagaagcaccgaacccacaacccagcggacggacaggcaggcaaggcccaagccgagccaccacagagcaaaaaccagccaaacagagcagggcgcacaccgcaccgcagacaccaaagcaagcaagagaaagagaaggacaaagcagagcgagagccaggccaagggggaaacagagcaggcagacaggcaggccgaggacagcagcgaaagcacacgaggcaaacgcagggcagagaggaccgacggccgggcgaaaccaaaaccaaccccaggacacacccccccaacaaggcaacacacaacccccaaagagccacaaagggaacaaaaagaacgagggggccaacaaaccacccaggggacggcacaggacaaccaggaccggcaaacaacggacacccaaagacgcgaaggcgcaaaaacgcaacaaaacaaagaacccccaccacagagaccgcccagaaacgccagaaaggcgcacgggaaaagcaaacaccgaacaaggacaaccgaaaaacaagcggcacccaaacgcagcggcccaaaaggcggaacaaagacccaggccaagcagaaggccaaaagcgaagcgcagccgcccggacccacccaacagcagggaacggacgcccacaacgaaaccaggaaacaaaccgaaagcgggaaaaggggaaggcaacacaaggccagaagcccccaaaggaagcaacaaacacccagacagaagcaaacaggacacaaccacacaaagagagaaagaaacccgcagaaacggagacaaggaaaagaagagaaagaagaggccgaggcacgggcagcgggggaacaagacaagggcggcaagcaaacccaagagcacgcaagaaacgaaaggccccaagaggagggaaacaaacacgcacaaagcgcgaggccgacaggcgccccagcccccaagaaagcagaacaaacccaagagaaaaggaagaccagggagaggaaggcagccccggaaggccggcacaggacaagagaggcaagcgcgccaaggaaagcagaagggaccaaaagccagccaacacccccgccccccaccgcccggagccgagggcaaggaacgccagcaagacagcaccacaacccgccgagccagaacacgaggcaaacaagcagcggaagcaccggggggggggccacaacagaaaagaagccggccaggacggccaacagaaccaacaaacaggagaaacagcgcagacgccgaaggaggaagaagaggcgcgaagagccaacccagggaaccagcaaccgagaaaagagagacaaaaggaaaccaagagaagcagaaaagaggaggcgcagggcagggagcggagcagagagcacagagccaggcaggcccaggaagagcaaaaaagaagacgaagaagacacgcgaaggggcgggcaggagg

SEQ ID NO: 684 - RNA, 587 nt, Mus musculus
  misc_feature (79)..(178): n is a, c, g, or u
ccgagcggggccgagcggcagcccggccggaaagaggcgaggccccgcgggccccgcggccgcccggaccacaagaaannnnnnnnnnnnnnnnnnnnnnnnnnnnnnnnnnnnnnnnnnnnnnnnnnnnnnnnnnnnnnnnnnnnnnnnnnnnnnnnnnnnnnnnnnnnnnnnnnnnggaacgggaccgagggcggccgggcgggggccgccaacagccccgcccggaccgggcgcggaaggcggaggccgggcgggcgcggcgagccgcgggcccgggggggcgcggcggcgaccgcgaggcgcgcgggcggggaccggcggccgcgccggggcgcgaggccccgcccccggcgcgcgcggggcccggcagcggacgcggcgcccggcggccggccggccagccgcccaaaaggcggcggcggaaagcacccgcaggggggcgagagcggagcgaacgagacgagggcggcggcgggcggagcgggaggcggagcgggaggcggagcagggagcggcccgcccgccgccaccgaggagcacccaccccgcgcgccggccgcccgcccgccagcccgcggagcggg

SEQ ID NO: 685 - RNA, 1280 nt, Mus musculus
gaaaagccccagagaccaacgagggcaaccagacagcgggacaggcccgcccacgggggggccacccgagcgggaccgggcaaagaaagcaggcgagcaagcgaaggagcaaacgggagcaggccccccaggccacacagccgacccaggccgcccgcgaccgccgacccgagaggaggagggaaggaagagaaaaacccccccccaccggcggcaagggccacacagcagagcaacccgacaagaaggccagaagcgaagaaaaaaacacccggagcggggggcagggggggggcaggaggaggagaggcgccgcacaagaagcccggccaacccagcaccacaaaaccaagcccacgcgagcacggggaggagagacagggcaaagcaaggcaccgcaaaaaaaaaaacaacccccaggggcccggaaagacagcgggaagccacaggaaaaagagcaggggaaacaaagccagcggccccaacagaggccagcgaaggaccgcccaggccacagcaagcaagaaggccaccagagcaagggaggcggcaccccagacagccaggacagaggagggaacaacacccagcccccccacagccgcccagcgccgggcccgggagcaccagaaaggcccaaccgccaaagccagaccaggaggcagcggcgacggggacccaccagaggagaggccagagagcccagggaaaccaaccacccccccacccgcacaggcgccaaccccggccccccccgaggggacaccaggccaaggaagcccggccacacccaaaaagccaagcccagcgaggggggggagggccaggcggccccgaagccggaaaagagccccgggaggaaccagggcaaagaaaaagaaggggcgggcagcccgggaaacggaggggggggcgacccgcccaggaccggccggccccacagggaaaggcgggggaggagacgaagaagaggaaggcaagccagcaccgaccccaccaaggacccggacgggacggacggggagagacaggccccgccagccggcggccggccaccgggggaggaaaggcacaaaaaacaaaggaaaaacaggcgaaagggaagaaagaggaaagggggaaggaaggggaggggagggccggccaaacgcgccacagaacaccgggacgcgcaaaaacacagaccaaagcggccaagcagaaaagacggagccggccccccacggaaagacaagacacaacaagcagcggaagaccgggcgggggccaagggaagaccg

SEQ ID NO: 686 - RNA, 8444 nt, Mus musculus
acaacacaagagccacacacacaagcacacaaaacacacacaacaacacagcacacacaacagcacacaccacaggcgaggaaacaaggaaggaaggggggaaaaggaccgcagccccgcagcaaccaaagcggcaccgaaggcaccaccaaacgacgccgcacagacgcaccggaggcgagcaggaggagccagcagccgcgggcacaaggcgagagagacccgaaaaaacaaacaaaaacaacagaaaacagaggaagaaagaaagcgcaaacaggcccagagcgacagacacagcacccagaacaaagggggggaacaccaggagacaagggaaagcggacacggaaacacaaaagcacgcggggaccagcacacggggccacgggggaagcggggaggagaagcggaccggacgcaccaacaggaagacagagaaaaacacgggaaggccagaacgaagaaaaaggaggcccaaccaaacggaaaaacacagagccaaaaaaaccgagcacagacaaaagccgaacgcccaaaaagaaaaaaacaaaaagaaacaacaaaagaaaaaaaaccagaacaagccagacagaaaggcacaaagaaacaaagggagggccagaaagaaaaaaaaaaaaagaagaaacggcagggaaagaacagaaccccaccccagaaaacagaccaacaaagagaacagaccagcaaagccccccgcacgaagaacgaaaggccgccgaaggagggggccgggccacgccggggaccccccccacccccgcggcagggccgcccccaggagcacgaacaaaagggccccggaccccgaagagccacgcacacaaccgaacagaccacgggggccagcggccgggggagggcaggaggaggcagcccccaggaagcagccgaaggaacgggcgcgccgggcggcggagcccagaaaccccacaaaaacaggggacacccaccaccggcgaggagcagccggcagagagacaggaggggcggagaccaaacccaaggggaaaaagcgcggaggagaggagaaccagggccgcggcaaaggcgacaccccgcggggccccgccaggcccggcgagagggccaggaggaggaagagggaggggcccgaggcccacgccgcaagccaggaagaccaaagggaggaaagcgcacgaccacaccccaacacagaaaagagccacaccacaccaagcaaaccaaagggaaagaaaagacacgcagagacgaacaaaaacaaaaacacaaaaggaaaggagaagcgggaagcgcaaaaagacccggcccaaacacagacaagacaccccagacaaacagaacccagcgaagagaaaagaaaaggacaaaacagcaggacccacaaacaggaacgcaaacagcaaagagaaagaaaagcgaaagcacaacaaaacagaaaaaaacccagagcggggagggccaagcaagcgcacaaggcagacaacgcgagggccagcaagagacaaggcccacaacccccccaagcaaggcaaagaaacgggagacgacagcgccccccccaagcccagcagaaggagcgcgcagccaccacggcggagcagagagggcggacaggcaggcacccagcgggaacggagagggcacagggcggggaacccaaggccccccccccggccacggcacgcggcggcgcagcacaggagcccggaccaggcagccccagccagagccaacggagagccgcgacgacaccacggcagcaaccggcgggccacaggcccccaaagcgaccccaggaggaagcgacaccccaaaaggagcaaccacagacagccgcccggcccgggacgaccaggcggcccaaccggaggaaacggagccagccacacacccaaagacccagaagcacggagagaggccagggaagagcagccgcccagaggccgagcaacccaggaacacaggggccacaaccacggaagggacgagccccggggcgaagacagcacaggaccaaaacaaaaaaaaaaaagcaaaaaaaaaggccaagaaaaaaaagggcaaaagaaaacgggaagaaaggagcaaaaaaaagaaaagccaaaaagaccccaaggcgaaccaccaacaccccacaaccccagcgccagaccgacgccccaggagaccaaggacgggcacgccagacacaaccacggacagcccacaaacccccgaagaggcccgccaagccaacaaaccccaagaagacaaggcaggagccaaggcgagcaaacacacacgacaggcacgcaaaggcgggcacacacagcacgggacacagcggcagggggacagaccgcacagcgcacacgcacaccccccccagaggagggaaccgagacaggccccagcccggccggcagcgggggggggggggggggggggggggcgagcgcgcgcgcacagaccagagaacaaacgggggccaaaagcgaacaaggccccgaccagaacccgaagcaggcggcggccagagagcccgcaacgccgggcagcgccagacggccggcccaagggcgggacaggcaggccagagcagagacaagcaccacgacgcacccgaagggcagcgggcgacccaccagcaggaccggcacagaaacacaccgacacaagaagacacgaaaggagggaacccgacagagaaaccccaagacacgcgaacgagccgaaggcacccaacaggaggggggagaaagccaccacggaggggccaccccgggcggggccggggcgaagaaagcaagcgagaaagccacaaggagcaagcccaaagcagacccccagaccgcacagcccgccccagcccaccggcgaagcgccggccccaaaggaagcgagccagaaaccgccccaaggaggccagggcacacagcgaagcaacccaacaagaaacacacacagaagcaccagggaagaaacaggaccgcaagcaggcaccaacaaaacaccgcaaggcaacgacagggcaccaccccccagccacaaaacggcacgcccagggaagcaaaaaccagggagcacagaacaggaacacaggcaggaagaaaaacacgaccccgcacaagaagagggagggagcgggagacagaagggcacagggggaagaaagagaaaaacaggcaccgggaaagggcagaggggagggagagggagagacaggccacagagagacgaaaacacaccgcagggaaggcggcccagggaagacaagaggaggcgggaaaggggccggggccgggcaagaccccaccgagcgccggaagacggacgagcagccccagagaagagagaacccagcaccgcacaaccgcggagcgccagccgccgagaaaggacgaacccgaaccgaagccagacccaaaaaggccaaagacgcggcagggcacacagcagaaacccaacaagacgcacaagacaccaaccagggggagaagaggcgaacagagaaaagggagaaaagaagaagggacaagggggagaaacagaagaagaggggcaggcggaccggaaggaaaacccaagcaagggaaagggggaggccaagacaccaggacaccaacagagggaccgagagaaagaagaagagcaaagagagaaaagcgagggagaagggaaaaggcagcagggaacagaaaaggaggaaagcccagagcccgggccccagaccagagcagacaacaagaaggaagaagaccaccacaaagccgggagaagaccgacagacacagagaaggccacggaacaggcacagcacggaagggaaaaggacagggcgaagaaccgccaggggagaaagaccgcgggcccccaagcgacagagccaccaccaggcagagagcccgagacgagcacgcagacgccgaggcgaacccgcggagcgaacccaggcacaaggaaagcagagcccagggcgcaacggccgaaaccgcacccggaaaaacccagcgaaaccgggaccccggcccccaccaccaaagcagggcccaccaaaagcaccagaaggacacccagacccagcgccaccgccagccagcaccaccgaaagacacacgccgacggccagcagcgggaaaaaccaaaaaaaaaaaaaaggcaggggggcagcaaccgggaggggcggacccagagagagacagagagcgcagggggcgggaaccagccggaccccgcaagagcaaccaggcgcaaccacggcgccccacccccaccccagcccagcacccaaaggacacaacgaccccagcaggccccaacccggaccccaggggcggaaaagcgagcgcacccaaggcccgcacgcgcgcgcacccccagcacacagcgccccacccgcacacaaagccccaggagaacccgggcaccagaccagcaccccaagccccacccaagccccccaccgcccaggacgaaccaccaaggcagagagccaaacagaaggcacaaaaaagccaacgcgcaaccagagccccacagccaaggcagaccaaagggacaagcaaagaaaaagccaagcacaaagaagccgagaaaacaagcaccgcacagaacaagcaaacgaggcgagcgaggacacaggaaaggggcacagggcagggagggcaagagcacgcaacaaagaaaaggagagagaccaagagagaggacacggggcggagagaaagccacggcaaggcgcgcccggcaagcacaaggaccgagcaagcccccagaccaggaaaaagagacgaagacagccagaaaccagcacaaccaacggaagccaggccagagaccgcaaaagaaaggagacaaccaaggaacgcaacaaggccggccacccacacacacacccaccccagagacacagacacacaaacacagagcacacagaaaggaagcaggcaagggacagccgaacaacacaagagagagcagaaagaaaagaggaggacccaagcgacaggagagaggccaccgagaggagacgggccaaacagacaaagcaaaaagagcaaggagagcaaagaaggagacagaagcgcaacagcaaagcaaccgaaaagacagcccaaagaagaaacagccgagaaccagaaacaagccaagaagacaaggagcagcacacagcacacaacagaaacagcacagaacaacgcacacaaacacacacacaaccagcacggacacacacgacacacacgcagaccacaaacacacagagggagggaagaaagggcggaaacgcgggaaaggaaacaaggcacagcaagaagcgggacaggaaagggagacacggcaccagcaggagaaacacagagacacccccccccagaagaaccccgccaccacacacggggacggggacacggcaggaaggggggggcgagcaggcggacagagggcagggcagcaacacaaaagccggcagcggcacagagcaagccgggaaaacgcaaaaagccccagccagagaggcggggcgggacgcggaacagggcgagcaggggcccaacggcacaaacgaagcggagacagaacacggcaaagaggcgacacagaggaaccgagaagaacgaggaaaagacaacaagaggagaccagcaaggggaagagggcagaagcagaaaaaaaggagcgccaaacgaggacagacaaacagaaggccacagcacaaaagaccccccacaaaaacgcacccccagccgccgcaagaggccacacgccaggcaacacaccccccaagcagaaaggaaaagaagaggagaaggccaacacaccaagagggcaacaagagacaagaaaagaaggagggcagcacaggaccgggaggcagaggggccgggcacaggagagcaccaccgaaagcagaacagcagcaacagacaccccacacccagaccacaaagcacggcacggcaggcgcacagggaaaagccaccagccaccagagcagcgcgcccccaagagcccagaaaaccacaccacaaacaagaaacaagacaggacagcagagagaacacaagaccccaacagaagccaaacacaaaggagacaaaccccacacggaaaggcaaaaagagagaggccgcagacccacacgcggaaacccaagaacagagagaagacacaacccgaaacgccaagaagagcaacggacgcaaggaagccagagagaaaaaacacaaacccagcccacagcccccaacagaaccccccccccccgccccccccccccaacacgcacgaggcaaaaaagccggacacaggaaggaaggacaggccagccaccccacccgcccacgccaccacaaacaacgagccgaacccgaagaaacacacccccccggagggaacagccaccacaaagaccgaaaacaccagcagacaaaaagggggacaaggaaggagggcaagcaaggagcaggagccaggacgagggggcgaagacgaaaaaagggagagcgcaccaaggaggagagagaaaacaaaacgagaacaaaagaagggcgccagagaaggagggagcacaccaaagaaaccagaagacccgccaggaggagcagccgagggaacagaggggcaaggcccgcgggacaagcaacacagaacaggcagaccaggcaggaaggacacaaacaaaagggggggacggagaacaaagaacccaagcccgaaagcagacaccagcacgccacggaagggcggcacaaggcggcgagggcaaacccacagcaagagaaaaaaccgaaaagccaaaaccaggcaccaaggaccaaaaaagcgccacaggcggcggaccacgagcccggcccgggcagccagcccagaggagcgagcagaaagcagccgaggagaaggcaggaaacgagaggacagagggggagggaccccagagggcagacagccaacaccaggacagacacaacagaagaaaaaaggaaaaaaaccaacaggaagggaacaaccaaaaaacaggaagaaacaaaaaaaaaaaaacacacacagaggcaggggcacaggagaccgggggggggggggggggggagcacagggagaaggcaagaagagagccaaggagaccagcagcacacacgggaaccacaaggcaaaggggaacagccagcagccagaaccccacaaagaaggccaaaggccgcgagcacaaaaaaaggggccggcaaaacagaagggagacacacacacacacacacacacacacacacacacacacacagagagagagagagagagagaggggggggggcacagaggagcaccacacaaggagcagccaaccgcgggcacaaagcccggaacgcccagccgaacccaaccagaacagaagaccccacaggaaaacaagcaagaaaacagcaccagagaaacagagcagaggggggacccagcaggggaggggaagcgagcccaggccacccagacagacacgaacacgggccaggcgcaccaggcaccccaccaccccccccaccaagaggcggaagagggggggaaaggaaaaccacaacccaccacagcccgggcagggcaggcacgcaagcgcacaagcaacgagccaagggcaaaccagcagaggaaaaccaaacgaccgaacagcccggcaggaggaaccacaccgagagaacaaaagggcgaaaagggcacaggcaaaaagcacccaaaccagaagccagaagaaagaaaagaaaaagccaccaaaaagcagaaacggaggaggcgagacaaacacagcagacaaaacacaggaagcggaacacccccaccgcacaagccggaagaggagggacgcgggggcaagaccagagaaacagcaacacggaaaaaaaacaaaaaaacacaacccaacccaagaaacaaacccaaaaaagacgaccaacaggagcaagacaccaagcccaggggggggaaccacgaagccaaaacacagggaggagagcagcgccaagcacacagagaaacgggaaccccggccgggaccgggagcacaccggggccagagaaaggcagcccagccgccacccagagccacagaacccagacccaccaccacccgaaaacgggggcgggaaagaccacaaagggggacgccaccagcgggccaagccggaaccacaccaacacaaaggccgccgacacccggcacagaccaccccggcgggaaacgcgcccacccagaccgaaccggaagcaacagccgcgccgccccccgagccgcccaacacagggaagcgggccccaccagcaccaggaccggcccccgcgagagagggagccacacgccaccggagacagaaccggaaaacaggcagagaaaaccaagcacaaaaagaccgaaagcgaacgcaacaaaaaggaaaaagagaacgcggggccagcggacaagcaacgccggaccacgc

SEQ ID NO: 687 - RNA, 687 nt, Mus musculus
cggcaacaaagcacggagagaaagggcgggccgaacgcgcaagaggaacaggcccccagccggcagggcagcaaggcccggcagacaggaacccagagcacacagcaaccggggcaaggacagccacaccaggcgaccgacggccgagcagagcagggccgcccccgggggggggcacgggaaggggcagcaagcgcaggaggcgcgccaccgacggccccagagcggagcgggagcgacaggaaagggcgaacaccacccaaaagcaagcaaggcaagggaagacggaaccaggcaggccgacgcccggggagagcgaggcgaaaagcgagacacagcccgcaccacaggcgccaagagagcagccccaagaggaaacacacggagccaccacagcccgggccacaggaccacagcacaaaaccacagaaaggcagccagggacaaaggacagcaaaggcagcggaaggcacccaacaaagccagacgaaaaggcccgagcaaaagcagcacagcggaaagaagaggccgccgcgacccacaaagcaacacagcagggagcaggcgggcgccagggccggccccagaccgcgcacgcgcgcgagccggaagaccaggacacccgcccccgggaggacccaccagagcaggccaggcagagacagccagccaggaagagccagccac

SEQ ID NO: 688 - RNA, 1059 nt, Mus musculus
cgaagccagccagcgcgcacacacgaagcacgagcgggccgcgcggggccagggggaaggggcggggcggggagaaggggcggggcgcgcagcagcgcgccggccgagggaagcggggacccgccccgccacgcccgccacgcagccacgacccgcaaaaaccgggaccgagagacgaaaaacagccggagccagagcgcgcggcgcccgaaaaagccaaaggaggaaacaaaacaaaggcgggggggcgccgccggcggagcggacgcgccagccggggagcagccgggcgcgaggaccggagaagccaacagcgggaagcaggccagaccgcggaggcaaagggcgggggggcggacgacaaaacagagagggaaacaccccagaggccagaaagcccaaaacagcccggggcagacacccggagggggccggcaaagaaagaacacgcgaacgacaagcgagaaaccaaggggagcgagccaggccccgaaagccagcgcgggcgccgccagcgcacggcagcagggcacagcccgacagggacaaccgcgaggagggccagagaccacaccccagggcgcggacaggaggagcccacggacggaggccaggagggaaacaagcgggagggaagaccaaagcaacccacaaaccagcgaagaaccaaaggggacagagacaccgaacaaaagaaaaacaaggcagagcaagaacaaaaaccccccgaaaaaaaaaaaaaaagaaacagggggggcccagggaggcgcacccgacacaggcagaaacacaccacaggaggcaagcgagcccacccagagaaccccaaccagagggccagaaaacgaacggcagcccccgaaggaaaagaaagcgacgaacgaggagggaaaaaccaggcaggcaacaaaaaccaaaaccgacacgaacacaaacccagcccggggagggcggagcacaaaaaacacagaggagagcaacagaagacaacaggagccgcccccgcagggcgggaacaaaccaggccaggagaggagcaagcaagcgaaccacggcgac

SEQ ID NO: 689 - RNA, 333 nt, Mus musculus
aagaacaaccagacccgggagccgcaccgcgagacaaaggccagggccacacgcaaagagaggcccaggacgcaaacaagccccagacaggggaagccaaggccaaaaagggggagggggggaggggaggggggagggagggggaccgggaagcagaaaagaaacgaggaaaaaccaaaaaaaaaaaaaagaaagaaagaaaaaagaagaccagaagagaaagaccccagccaggaggcaggacaacagaaaaaggcacgccaaaagcaacacagacaagcaaccccacaaaaccaaccaaccaacgaagaaagggcaacggcagacacagaa

SEQ ID NO: 690 - RNA, 5993 nt, Mus musculus
ggccgaccgagcagccggaacagccacacgaggcagcacaagcaggggcccaacacgaaagcgggcaaaaacccagaaagcaggggcgcggggggagggccgcgaacaaagcggcccacaaagccagcgagcgaacgcagacgacaggaaaacacaagagccacggccccgaaaaacccaacaggaggaagaaaaaaaaaaaaaaaaaaaaaaaaagaagaagaagaagaagaaaaaggagaaaaagcaccaacggacacaagggggagaacgccaaaccgcggcacgccgcggggcgcaggagcaggagcggaagagccaccagcgcgccccagggccaggcggagcagcagcgggcagggagggaccgcaacagcagcggcaccgacagccccgggacggaaaaggaggacacagcagcgggaaaaaagaaaacaaagcccgggcggaggccgcgccaagcaagcaccacccacaagcggggagcggcccagccaccgggacaaccaaaggcacagcccgggaccgcgccccaagaagccgaacccgagaagagcgcgccccccgccccaaccaggaaaaccccgcccgaccggcagagcagccagcgcaagcaaaggcccagagcaggcggacgccgcgccaagaggggggcgcacgggaagccagcccacgccaagaccacacccacgcccaaaccaccacagacggccaggagacacgcccgggacgaagccggaggaaacgggagaaagaaaggaagcacgagacccagcagaggcacccaggaggagggcagaggacccaaggaagacccgcagcagcgggaccccaaggggaagccagcccggggcaggggacgagacagcacggggagggggcgacccaccccggggcacgcccggagggaggggggcggcggagccccacaggagcccccggacacaaacaacacccaggcaggggagcgccagggcggaggcgacccagacaagcgcagaagggaggggagcaagcaaaaggaaggggcccgcaaagaggggaaaccgccccccagacgacagaggcaaacccagggagaagaaggggagcgcaggccccgggggagaagggaacacgaagcacccacacagccgccggcgagaccccaaagaccggggacgggaaaacgcagcagacaaaacaaggccaccgggacccagaaacagaagcaaacccagaacacacacacacacacacacacacacacacacacacacacacacacaccaacacgcgagcaggaaggaaaggagagaagacagcgaggagcagcaaaccacccacgacaagagcggggacgcaaaggccaggcaccaggcggacgggcccaaacccggacaagggaggcaacccaagcccagaagcaacaaccacccacagggacgaccaagagaagagcagcaacgcaccaggaaaggagggcaaagccggggggcagacaaggggggaacgacaccaccgaagcagcaccggggaagcagagcgagcaggaggcagcccgggaaggcacagacggccacacaaagcgcccgacgagaccgaccgagcacaaccgcaagcacccaaacaccaagcccagaccacaaagaacaagagcccccgaagagccacacccaccaacacgccccgcccgaggaagagcgaggcggaaagggcaggggggaacaggaggggggagaacaagagaaggacccacacaccaagaaagcccgacacacacacacccccaaggcaaaacgaaagcaagaagccggagaaagggacacaccaggaaggaccaaaggaccaaaggcaggcgaccagaacaggccaagcaaaagaaaccgccaaacacgaacaccccagaggggggggaaaaaggccaccaaggggcaaggggccaaaagcagacaaaggcggagccaacgacaaagccggcgcacagacaccaaaaacagcccgggaaggcaggaagggcgcaagcacccacagcccacaccaacagcagcaagcgcggcagaccaacagacagaagcgggggacagaggggacaggaggaaggagaagggggcgcaggagaaaggaaaaacgaggcccggaaaacaacggaccagcgccaggagaacacaggcaaaagaggaggagggcagaagagagcaacagccagccaggagcaaggagccagacagcaagagaaagagcaagacaagagccagaggcacgcacaagacgccaggccagaagaaagcagacaggcacaagaaggaccaacaaaaacaacaaaggcaggaggcgaccggcggggcacaggcgaggccccaggcgcacaagggcaagagacaaggaaaacacaccgccaacagccgaaaaggcggacgaaccaccgcccaaaacaaaacaccagaacaacacagagacagaaagacagagggcgacaggcacacaggcacacacacacacacacacacacacacacacacacacacacacacacacacggacccagccggagaccaaggaggacgagggaaacaacaagcgaagccaaagcagccagaagagcaggccgggaaacaaagcccagaccagacaaacaagcaagcaagcgaaaaaagaggccaggaccacgagcagcagccaaccccgaagaccggaccaaaaacagaaggaaaaaaaccaggcgaggacaaagagagagcaccaagagaagcccgcagcgagcacacgccgcaccgaaggcaaagcaggagagaacccgggccccgcccccacacaaggaaaacggcagcacacaaagccagaccccagcgccgacacaggacggcaagcacagggagggagacccagacacggcccgcgaaggccaaaaggacccccgccagcaaaggcccggaaaacacaaggcaaaacacacacgcagcccagacgccgcccccgccaccaccccagaaaccagcaaagaccaggcaacagaacgaggaacgaccaaagggccggcgccagaagcgggggccaagacccagcgggggaaaagaacacggcaaaggaacagccccacagcaagaagagcagacacaaagcagacagcaacgaccaggcgcacccccgggaagccagggacgcaaacacaccacggaagagcacagccaagacgcacaagcccgggggcaccaacgcggacagagaaaagcaagagggagaagaaaagaaaaggccggagcagccaggggccaacagacccagaagaaaagacaaggcacaccccagggcacaagcaccacgcgagaaacaaaggccacagaacaacagcaacacagaccgggggaacaacgaacaaccaacgagaacacacaagcacaagaggggaacagcgaaagccagcagggacaaacagaagaaaaaacgacagagagggccaggaagcaacccgacaaacaaagaggacacaggccaaccgcaccaaagccgagagacgccccaaggaagacaacagagggagcacacacaagaaaaccgacacagcgaggaagcaggggggcccacaggcccaccgagaagcgagaggagggagggaaggaaaaaagaggaccaggacagaggaaaacagaggagggacaggggaggaagaacgaagaaggaagagaccgcaaaaggcagacaggggcaaaacaaaaccaaaaggggaagggaccaggagggacacaacccagaaaagagcagagaaacaggcgcagccaacagccccggcaacaaccacccaaagaggcagcaccaccaaaggaagcacccagcaaccaaggaaacacaaccaggaagagaaagagaacaaagaaacaaaccccaggaaacacaggagcagagccacggccaagagaaccccagcaggagcacccagccgaagcaaagaagagacggagcccagcagggcaaagggcaccaggagaaaaacccgagagaaaaagaaaagcaagaaacccagcaccggacacagggaaacccaggaagaagcaccaggggaagcggccggacccaagaaagcacggaaagagagcaggggagaaggcagggcgcagagggagagacccggggagcagaagccagagaggcaaagcaagcaaggacgaggagggaaggaaaaaggcaagaggcagcagaggaacaaaagcaaaaacacaaagagaaggcgagacaacgagcaaagacagagagcagggcaaggaagaagagcagaagaaccagagacacggggggaaggcgaagagggcccaggaccagagaaggcagaggcgggcggaaggcaacgagggccgacccaaaaggcacaaggaagaaggaaaccaagggaagaagcagaggagagggcaacaaaagaaacaggaccgcgggacaccgccgacgccccccccccacccacaacccccgaccaccaccacacagcccccgacgcccacgaccccaaaaaacccgccccccaaaaaccaccacgacacacagcagaaaagggaaccacagggagcacaacaccagaacagaaggagcacggaacggaaggcgacggcagagaaaaggaggagacgccaaagaagaaggagaccgagcaggggaaggaaggagaaacaaggaaggagaaaaaagggacacgaaaacaaaaaaaacaagcaaacaaaaaccaacaacaagcacacagaagaccagaacgagcagcagaaaacgaggagaagggcaacagaagaaacaagcaccagggaaaccggccgcccgcccccaccgccgccccaaggagaccgaaagagaacgagccaaacaccaaaaaagcacaggaccagacaggcccagcaagcagcggaggccgaggaacagaggagagagaagagaagacacagagagagagcaaagagaggggaaggcaaggacagaaccaaaaggacccgcgggacacacccgggaagccggagaccccaccccaagaaacagcaacgcggagaaacacacagcaccaaggaagaaaaacaacaagaagaggcggagaagcccacaacagaggaagaaagggggagggacccccagaagaggagaaacaaagagggaagaaggaagagacagaccagcgagaggagggcggcagccgccaagcggcgaagggacaagaagcaggaagcaggagcccggcacaacaaggggcaggacacagaccagccaccgcccccgaaacgaaaaaacagcaagagcacaaaaggacagcagacaggaggggaaacacagaacccgagcgaaaaacggacagcacaccaagaaaaggagcaagcgccaacccgccgaggaagcgagaggaaggacacaccagagaaaagcaagcccaggaggccggccacaagacgcccagacccgccccgaccacgccgggcacgcgcacaccaacccaggacagaccagccagcagacgcgcgaagcaaaagcccggcggaaaaaacacaaggggaaagagaaggcaaacagaggacaagcaacccaagaaggccgcggacgcacgcagagcaagcagcgcgacaaggaacgaagcacgcgaagccaacggggccacaacacccccgaaaggccaagaaaacgccaaggagcccccccaggagagaaaccacgccaagagaaggcagacaggcaaacccgggggagaggcccacggaaagacgaaacacacccggcagagaacacagaacggaaaaaccagcaagaggaaaagacaggcccgggaaccaagaccgcacaacgagacagagaacaaaagagccagcccaagagcaacccaaaacagcccggggggggacccccaaccaaaagaggcaaaaacgaaccagcacgaagaagaagaaagaggaggcaggcacccccggaaggaccgccgcaaagggcagacacagagggcgaacgcgacaaacggcagcaaaccaaggagagagggaacacagaaccgacac

SEQ ID NO: 691 - RNA, 4715 nt, Mus musculus
caaaaaccacccagcccaaggcgggaaaaacagaacacacacagcaaccagaaagcaaaacagcgcccccagcccggagaccaccaaagcggagacagcggggacacgcccaacacaacggggagagcgaggcaggaggaaagaaaaaaaacgagaccggacagaaagcaaaagccaaagaggcggagcgaaaccggggcgagaacaagcagaacaggccaggacagccgggcaggcccagaagacaccgaggcgcggccaaaagaaaagagaagacagacggcccgcacccccaccccgccccgaccaagaaagacgcagaagcgcgagaaaggaccaacaggaaaccgcaccaacccccccagacccagaccccaaaaaaccccagcccaagcccgggagaaccacgcccgcggagaacgcaacccagagcccgccaaaacacccggaacacaagaccgcggcggacggggcacgcgaacgggaggaggggggccccacaggcccaagagaggcaagacccaggccccccaggcgcacgcacccgggccaggcaacacaccaaagccccggacaagcccgaccacacaacgcacacacacacacacacacacacacacacacacacacacagagggagagggagagggagagggagagggagagggagagggagagggagagggagagggagagggagagggaggagaggggagagacaacaagcacacacacacaacaccaacaggaaaacgaggaaacaacagcgcgcaggcacaggccaggaaagccgaagcacaggaggaacaaagaaaccgacagcgagaacgaaagagcccccaccaaaagcgcacccccacccacaaagcaaagagaagagaaccccaacacaaaggccgaccagcaggagaaggggccaaggacgaccagccagacaccacaagggaaggcgggccgcagaagggcggccaaaacccgggggcaggagagcaaggagggggagccccacagccagagaaacagaaaaaggaacccagcaaggcaaggcacaaagaccccagaaagaaagcggggccaacgcaaaagagcacaaaccacaaaaagaaaagaaagagaaaaacgccagccaaaaaaaaaaaaaagaaaaaaaaaaagcccaaagcacgcggaaaagaagaaaccaagcaccgagcaaacaaacacacggcaaaaaacgaacagcacccacacggagccaagcggggaccaaaccagacaacacaccgcaagaggcggggaaagcacgcagcacaggaaaggagaagagaaaaaaaacagaggaggagaccaacaaggaggagcacacagcagcacagaaaaaaagacagcaagccgaacaccggggccgcggccgagaccgaccgcccaaaacgcccagcacaagacagaagcaaaaaaaaggaaagagggccggagggaaggggacgacccacacaaaagaaaaggaagcacaaaggaacacacgcagcgcgaagcagagccgaccgggacccaccccccccccggcggagaccaagcgccaagagcccaaccacagccacgggggcgcacaagcaccggaaaaagaccaggcggagaaaaagcgcgcacagcaggcaagcaacccgccagaaccacccggaccacggccaaaaagacaccaacggagcagagcgagacacaccggcaagcaagaaaaaaaaaaggcaagggacaaagacgacaggggcgggcgcaaccaccgaccagaaagaacaaagcggcaagccggaggaaccgcaacccaaagccaaaacgagcccacagacccaggcccaggcacaggcccaaggcagaggaccgccagaggggcagcaaagacacgggggagcagaaaagccgacaaccgcagggacacagacgagccgccccgagacaaccccaggggaaagaaccaaggggcagaagacggggagagcgccgaaaacgaacagaacagcacagaacacgacacgggggacccagaccgggagggggggggggcaggaggagacagcaggcaagcacaaaaaaggaaggcagaggaaaaaaccaagggccccccccccccccccccccccccccccccccccccccccccccccccccccccccccccccccccccccccccccccccccccccccacgaagcaggacagagagacaggagaccggaacgacccagcgggagccacgagcccagggccccgacacccccagcagccagggcaacgggacggggacccaggggccgccacacacggaccgaccgccccagccccagcaccaaagcaggaaaaaaagcgggaaagcggcagccacgagcgcagcacaccagacgccaagcggacaggggagcgccacagacccacgggacccaacacccagggcgagaaacgaaaaaaaaaagccaagggacaaacccacacacaaacaaaagagaaacgcagacacagccacagagagggccaagaaccaaggggcaaccagaggaggcagcagggcggcaacacgagccaaggagcccgagcaggaggagcaacaaagggaaccggagcgagagggggggagacgagcagccaacccgcaggaccaccagaacacagacgaggaaaaccggcccacgaaaaaaagaaaacccacaccaccaagcgcgaggcaaccaaggaacggccggaagcacacaggcccgaaaagccacagccgagaaaaagacgcaagaaacggagacgaaggcggcacaaaacaaaaccccccccaaaacgcccgaagaaacgccagacccagcgagggaaaaaaccgcagacaccgagacagaggacaccagccggcccacacagcaggcggggcggggcggcagcgcccaagcagagcaagaaaaggacccgcccgcacagcccgcgaagccaaaaccgaaccagcaagagaaaccagcccacccaggcagaagagggcacggccccagcggggcacaaaggcaaggggggaccagacagaaacacgcccagcgcacacgagcagcagggggggcgggagaacagacagagagaaaaaggcaccaaaagccccaggagacccacacaagcggcacaccacccgaccaaggacaagaggagagaacggccccgccacgccaacccgaacagaggaaagagaccacaaacaccccccacccgaggccggccaccccgagagccgcaaacaaggaccaaggagagcagaaaagaaaaaaaaagacgcagcaaccaggaccgcgccaaggaaaaccccccagcacaggacagagggaagcacagaacacgggagaagcacaagacagggggaacgccaggggacccggccacgacaaaaaccggaggaaggaaggaagcagagaggaagacgccagcccaggcgagaggcgcaaaccacaggggaggaaccaggcagagacggaagccgagcgcggcacagggcgcgccacgagggccaggaaacagagaaaggggcggaaccaagacccccccacaccaaccgccccaggagccccagcccaaaggcgcagccccacgaggaggggcacccagggggaacaggaagcaacacagagccgcagggaggagcaccaccaaaaggaagcagggacaccaccgaaaaaccaagaccaacgaggggcacccccgccacccacaaaagggcaaccccagaccacacccgcaccaacaggagcgggccagccagaagcaagcagccaaagcacaagcaaaaagacggcacaccaagacccgggaaaagagcgggcaagacaagggagagcaggaggcaggaggcgccccgcccagccccagcgccagaaaaggcacggaaccacgggggcaggggaccccagagccaccagagccagaagggcgcagaggagaaaacaggcccaagcgcccagaaggacgacaagacagggccagggcaccagggaggagaagcacaccaacacagcccacaaacagccggagccgggggaggagccgcaggggaaaaacacacgaggaggacagggcacccgaagcaaagaagccaggcccagggcaaaaggggcacaaggggcagccacagggccccaaccaccaagaacgccaccaaggaacaacggaccaaaaaccacaaacggacgaaccaaggaaaagagaggagacaaagagcgggcaaccccaagaccgcaccacacagcccacagggggaagggccacaaccggaggacaaacaggagcaacgcacaagggcccccacgcagagaagcaagaccccacccccaccccccggggcccgaaaccacagaggaagaaaaccaacaacgcgacccaccagacaccaaaaaaggaggagagcacaggaagcagcagaagaaaaacccgacacgggagagagggacagcaccggagaaaggcaggcagcaggagagccgacaaaaggcccaaacaaaggaaggagagaagggccaacgggggagggcccccgcagccggacgaacccaacaaggggaaacaaaagaggcaaaaagcggggacgccggcccagggcgcccggggccaggaaaagacaaagggaaaccagccagaaaagaggagggcacacggaacaaggcgagggcaccggcgcaaaaacacggggagggcaccaacacaagggggagacagaaaaaag

SEQ ID NO: 692 - RNA, 1416 nt, Mus musculus
  misc_feature (494)..(593): n is a, c, g, or u
aagaagcgcaagacaagaccgagcgagagcagggagagcagccagcacccccccacgggcccgggaaccccccgggcccacgcccgccacaggacaggcccaggcaccaggccccacccacccacgggacgaacggggaggcgaggaaggcccggcaggggaaagacccgagagagcagccagaggaaaacagcccaagcgggcaggggcacagccaaccagcaccgggaggcagaggcaggggacgagcgaggccagccggcagagaggagccggccaggacagccagggcacacagagaaaccggccaaaaacaaaaaaacaaaaacaagaacaaaaaaccccccaaaaacccagccccaaggagagggaagcacaccggggaccacagacgggaggcgaggcaaaggagccgggacagcgggcacaagagagagagacagacaaacaaacgggggggaggggaggggacgaaaaggggaagggaggggaannnnnnnnnnnnnnnnnnnnnnnnnnnnnnnnnnnnnnnnnnnnnnnnnnnnnnnnnnnnnnnnnnnnnnnnnnnnnnnnnnnnnnnnnnnnnnnnnnnnaggggaggggaggggagacacacaccccccggcacagcaccagagagggcggccacgcccggggagggggcagcggcagcaaaagcccgggagaaccacaaccccaccggagccaggagacggcacacaccagcaacccagcgcccaggaggcggagagccagaagcaagggcacacgagaccgccccaaaagccacaggcgccagagcccaaagcgcaggagcaaacaggcaggccgccagccccagcccagaccagaaccacagccagcggggcgggcaacccagccaacggcgaggcggccgagcccacggcgcgaccaggacaagcgccccccagcaagaagcacccaggcaggcccccagaccccgagacagaagggcaaaaagaaacggggccccacccaagcgcaaaaaaaaaaaaaaaaagaagacacgagcgccaggcacgcagaagagagcacagaccgacggaggggaacaccaggggcgggagaaccaggaccggaagagcagcggcaccaaccacgagccaccaccagccccgcaaaagaaaaaagaagacagagcgccagacacccagaagagggagcagaccgacggaggggagccaccaggggcgggagaaccggacccggaagagcagcggggccacccacgagccaccaccagcccccccgcaaaagcagcaggccagggaacggccccaaagccccggagcccgccggcccaccgcgccagggaaccacccgggcggacccaaagccaggagacagccggccgaaaggaggacagagagcggaggcagcccggggagcaggaac

SEQ ID NO: 693 - RNA, 8720 nt, Mus musculus
ccccccggacagccccccaaccacacggcgcccagaagcccagaagccacccagcccccccccaccccacccagcacagaccagcacagaaccacggacagggagagggagcagcacccccaggagcgcccacgccaaccccaggggggaaaccggagcaacacgagccggaaacacaggcgacaaccaaggagcaggagaacccagcagcagcagcccccaacccgacaggcccgccacaaccgacaaagcagccccacaaccgccgagagggcgaccgagaacaagcggagaccaggacacggggccagaccagccccccccccgaggagacgcaagcccacaacagcccggcccccacacaacaccaaagggcggcaagagaggcccgaggcacacaagcgcgggccggaggccaccacagaccccacaggacccaacgacaagaaaagcggacaaggacgagggaaggaagcacaagagcgcccaaagggagccagggaccaagagaacagggcacacccccacccacaacaacacacaacacacaaacacacccccccccccccccccccccccccccccccgaaggccacagcccgccccggcccaccgaaccccagccaaacccgccccccaccaacacccgaggaacacacagagccccggaccagaagaacccacagaagcgagaccccaggaacaggggacagcacgccaccggaagccccaacacaggcgcccccaagcaggccaaaccacccgaaagaaggggagaaggggcacaaacaaccaaaggaggaggaagaaaaggagccggcgagagggcgggcgcagaggaggcaaagacgcaaaaccacggcaagaagcagaggcggcggaggcaaaggggccggaccacaaccggcggcagacgccccgaagggccggcccgcagagacaaaccagggcaagacagagaggcgccacacagcaccgggccagagaaaccacccggaagccccccacccgcccagggccaaggagcgagacagaggccgcccgagaggggggccagcggagccggggacccgggcggagaaaaccggacaaagcaaagacgaggcgaggcgaggccccgaacccgcgaacccagcgccagcccaccagcgcccacagccggccccaagcaggagcggacccagcccaggagacacaggaacccccacagaagcgccagggggcacccgcggccaggaccaacaggacaaaaccccagcacacaggcagacgaaagacccaaaacgaaaaacaaagaaaagaaggaagaggccaaggccaccaacacgggggacgggaccaagaagcggcgggccaggaccacaccaaaccaaggaccaaaaggcgaggcagagaacgcagggacacaagcaaaccaggccaaccagagcgagaggagaccgccaaaaaacaaagcagggggcgggcaggccgcaggaaaagcacgccaccaaaccgacagccgagaacccaagacccaggagagaagagcccagaccccgggccacagaaaccaaagacgcacacacaccacacacacaccacacacacacacacacacacacacacacacacacagaaaaccaaccaaacgcaaccaaaaaggccgcaaccaaccgcccacacagcccaaaagcgcgaaacccagcccaaggcggcaccggggagagaccaagcaagccaggcaggacgaagccccccagaaggcaggacagccagaaacggacccaccccacaaagcacgccaccaagccaggggccagccgggacaagcggccggcccccaacaaaaacaagccacggcaaaagaaggagacccaagcagcagagggccgggccacagacagcaaggagaaaaaaggagggagcagccagcaaaggagccacaaacagcaggggaccgaaagagacacagggacaagaccccccggggcaccagcacccaacagcacagcaagagaccacaggaaagacaagcagcagggggggagccaaggaggacaaaaaccaggaagccacgcgccaaggaaacaaggccaaagagacaaagagccagaccaaggggggcaggagaaaacagcgagaagagagaagccaaagcagcaggaggagaaggggaaagcaagaccaggagccaagaggaaagccgggggaaggggcggggggagcggagagaggccagcgggaagagcagacgcccgaaggccgagcaaacccagcagccacggagccaaaccaccaaagagacacccccggaggcgaagacagcacaggacaaaaaaaaaaggcaagacaaggcccggagcccggcgccggaaccacgagaccaggcggcccgaaccagaaacgccgcccgcccccaaggcgggaaaaggcggcgccccccaccaccagcaaaaaaaacaaaaaaaaaaaaaaggaaagcccaggcccgggaaccaaggggcgcagagcagcccaaaaggggcccaagcagcagggggcaccaagaggccaggcggacagggcggcaccaacccagaggggaggagggccagcccagccgccagccggccgccagcggggaaccaaagaacccagcccccaacccaccccggcaacaggacagcaaggccaccgccgcgccaggagagcaggccggggcggcgcccagggaacggggggggggggacccaaacaagcccagaacacccccacgccggaagggagcaaccccaaggaccaaggcccaagcaaagcccaccgccgccccgcccaccccacagggcccggaggggggcggaagacagacacaggcgcgggaagcaaggaaaggggagaaaaccagacccagcaggaggggggggaacagagaagcagagagaggcgcgcacacggccagcgagcccgaacgggggggggccacagcgagggcaaggccggcccggccccaagccagccgaaagaagacgggcacaaacagcacagccagaccggccgggggaccgggaggccaacaccccggaccgcagcaccaaacccccccccacccaagccccaggaaaagaagagcagcaccccacaccccaccccaccccacaagggacaagaagccccccaaccccccaacagacaaccaccaggcacacacaacccaaacacgcccgggaccacgagcccagcccaccgaaaccggaaagaaagggaccccgccgaagagagacgggcagcaaaaaacacacaagacccccccagggagaaaagacaggaaacacagaaacccaggcaagagcagggccgacaggggcgaggcccagcagaaggccggggacccaaagccaccccccaaccaggaagcacagggcaccgccccggccaggggaacacgccagcccggaaccccaaccaaggcccagggcccccaccaaccccccccaagggccgggaccaaggaaaaccaaaagaaggaaccagcagaagaagaagggaagaaaggacgagaacgaaggcacgccgagaagacgccgacgaaggccgccccaggagaagagaacccgaaaaaaaaaaacgccgggcaggggggcacaccaacccagcacgggaggcagaggcaggaggacgagcgaggccagccggcacaaaggagccaggacagccagggcacacagagaaacccgccgaaaaaacaaacaaacaaacaaaccccggaggggacagaccccaaaacccaacccggggagccgagggaggaagcaaccaacgggcagccgggcacagcaaaagaaaggcccgggagaggcagaggggaggaaagccccccacagggaccgaggcccggagaaccgaggccaccaccccccccccagaggaaaccagcagagggagagccaagccaaacccgccgagcccacgcgcaggggcgggagagaaaaacaccaccacgggaaggagagagcagagagggcgaaggggaagagaaaaccgcgggcaacagaaagcagaaacagaaacaaaaacagaaacagaaacagaaacagaaacagacaaaaacggaccccaggagacaccgacaggcccagcaggaaggaggcaagcgcagaaaagggcgaacaccacggggggggggggggggggggcgaagggcggggcgagaccacagaggggaggcagaggagacgaggagccagccccccaccagacaccagggagaacccgagggggggcagaagggagcgccccccgagaccccggcccaagccagggaaacacacccaccgcccaacagagaaccgagccaggggggggagggggaacacgagcggacacagccgccgcccacagagcccagacgcacgagggaaagagggaggcgagggaggcaccccccggcgccacagcccagccccccagggaggaacgggcggagaccggcacccgacgcgggcgggagagcgagggggggaggggagcaaaaaagagaaggagagcgaagcccccaccggggcaggggacaagacaccgacagagccaggggaacaaaaaagcagagcagcgggcgaggccagagccccagccagaaccgcaaggcacgcccaccgcccccgggagcccgagccccaggaccccaggagaggcaaaggggagaagagccccgcgaaagacaaaaccacaaggagccaccaaaccccggacacagcccgcagacccagccaggggggcggggccagaggcagaacaacaaagacagcgccggcgggaaagaaacgaaccaacgcacggcgggcagaaacagccccaggagaggacagaaggcacagcccgcgggccaccccgagggcaccccagggacccccgccaacacacagacggggcagccaggacaaccgccgcgcagaggagaccgcccaacggggggagggaagacgccaccccagaggccacagcgaaccaacacgccagaacccgcccccaggcccaggagcaaggcgacaccacgcgggaacagggaacaggaaccagagaacgccccaacagggaaccagaggcgcaggccgcaggcagaccaagacggagcagacggcccccaccggcccagaaccagagaacagggaggccgagccccgaccagcccgggccagacccgagaagaaaccccgccgcaccgagaacgacccgcgcacacaccccagaggagcccgccacccccaagcccgacgggccgccgccgcacccccagacaccgcagcacggccccagccaccacgccacccccccacgcaggcggcggaccagcccggccaaccgccccccaccaggggcaccagccaggccacggcccaggcacgcggggacgcgggaggagcgggacccgccacccaacagggccagcgccacgaggagcgggcacaagaaacagggggccgggacgggggggccccgccgaacgacagccaccacgcccagcgggaaagcggcccccagacgagaacaaagaagacgaaggcggccgagggagaacagccccacggcaccagaacacggacaccacccagccacacccggccggcggccaggagggcagagccacagccgcacacccccgacaaccgggacaccacagcgacccagaccaccgcggccccgccaacccgaaccgaggccgcgccccccaggacccacccaccccgggagaccagccgagaacaggaggcgaagaacaaacccagccccaaagagaaaagacacaagccggaagcagagccgcgcccgcagggcccgaagaaacacacgaacccacagaggcaggagacaagaggcacggagagagccacccggacccaagcaggccgagagcacagcaagcaagccgacgggccaagccccaggccgagccacccccgccagccgaggaaccaaacccagacaccaagcacaacagaacggccccgcccagcaccgaggggggggaagaggagaagacacccccacaaccacccaaagagcacgcagacccccccgacccccagagcaggcaccagcgcaaccagcagccacaccacaagcaaaacaccaacggccgacgcccgggaaaagggagaacacacggcgaggcagcccggaccgagggcggccccacgcaaagcacagaaagccccggggcccccacgggcacccacccgagaaccacacgacagacccgggcagcagagcgccggcgaacgcacccacgggaggagagacggaggcccggccgacccgcgcgccacccagaccgcccgggcccagaccgaggaggaccgccccgcagggacgcccccgcaccgaccccaggacgcagccacaacaccccaggcccgccggccgagccgcgcaaccggcacggaagcaggaccgggcccggacacccacgcccaagcagacacaacagcccggcacacggccacagagagagaggccacgcgccagaagcaaaccagagagagggagagaaaccagcagcaacaaaagagggagggcgacaccaggagcacaggcggaggagaaggcgggaagaagagacgcacagagaaaccacaaaggaccaaaaccaagccgcccggcggaggggagggggaggggagcggaagggcaacgcaccgaagggggcccgcccggccgcaaccagagagcgccaggaagcccagccgccccacggcgagaagagcgagaacagagggcagcaagcacacccacgagccagacccaagcccaacacgcaaaacacaaaggcaaagcaacaggccagcaagaggcaggggaggagcaaaacagacaaaccgacaaccagaaccccaaccccaaagggacaagagagaagaacccaagaggaaaaaaaaaacacacaacacacacacaagaaacacacacaaagcacacagaaacacacacacaacagaaagacaacaaacacaacaacagcaacacacaacaacaaacaaaaacaacacaaaaacaaacacacaggacacaaagacacaaacaagcagaaacaacaagcacgacaacacaacaacacacaaacacacaacaacaaaacacacagacacaacacacacaagaaaaacacagcaaacacaacagacaaaacaacacacaaagcacaacaacaaacaacaaccaacacaacagagaacacacaacacagcaacaagaaaaagcacacaagcaagcaaaaagccacaaacaggcaaccccgggcccacaggccgaggaccaaaaccacggggcagggcagcccaggcagaggcagacagcagcgcagaacagaagcggcccagccaagggccgcccggggaaaggcgggaccccccccacagaacaaggccccgcccaccaggaggcccccagccccccgggaccccaggagaagaaagacccccagccaaagggcacgggacagcccccgcgcaccgcgggaaggagcccaagcccaaaccgaggagagcggggaaaaaggggggggacagaggcacccccacccccggcgaaacagggcggagcccaggcaacagcaaggcggccagaacccgaccccgcccaccccaggacgggaaagaggacagcacccaaccaccgaagcgcgcgcagagcccaggcagcccaagacccaaggacccaaggacgggaagggggggcacaccacaccccaaggcccagaggcacgaacagacacgcccacggccccaacagagcagccacagagggcagggcagagccagacgccaaaccagaggcaccccgcccggaggagaaaacggcaacaggaagccaacacagacgaggacacaaacgacaagccgggagacccagagcccagagcaaccagggaggcgaaaagagaaacagacaccaagccccacaagccggccgcaaacaaaaagaaagagccacaagaaaccccaccgcacggcaacgaagccaacggacacccaaaggcacaaagccagccaggggcaggacacaccaaagccaagaccaggaggcgagagccaggcaagagcaaggccaacaaaacccggcaaaacaaaacccagcccaaaccaaaccccagagacccaagcaccacacaacaacgaaacccaacaaaaagcccccaccccccccacaacccaaggcaccccaccccaaccccgccagaggcccagaagaccacaggccaaggaacaaaggcccaaagcccgagaaccacgccacacccaccccaaagcaaaagaaaggcagcaggcgccccaggacagagacgggccagcgcaggcccccccaccaccccaaacagggggaggacaagacaacacggacggaggggacggggggccggggcccccaggggcaagagaggcgcagggcgcacaacgggggcccaccaaggagggggccaggcgggggccgggcacagggcaagacggccccgggcaggaagaccccagcggaaccaacagaagccaccggaagaaacgagcccagaagcacggcagaagcacagcacgcacaagagaaccgggacccacaccccaccaagagaaaaaagagaacagacaggcccaacaggggggagggggggcagggcaccacaggggcccaacccagaaaaggcgcggaccccagagcggagaaggcaggggaaccagcaacgggggcgaaaacaaacgggccccagaccaccc

SEQ ID NO: 694 - RNA, 4583 nt, Mus musculus
  misc_feature (1)..(95): n is a, c, g, or u
nnnnnnnnnnnnnnnnnnnnnnnnnnnnnnnnnnnnnnnnnnnnnnnnnnnnnnnnnnnnnnnnnnnnnnnnnnnnnnnnnnnnnnnnnnnnnnnagcgccggaaccaacggccgaggcgcccacgggaaagaggaagagagcaggagcagccggggggagggggagaggggggccccagcggggcacagaggcgggaagagaacacacacgggaagcccccgaccgcacaagcgcgaggacccaccgcgggcaaaccccgcagccccggagagcacaaccccggacagacaccccccaggcaaaaaaacaaacacccagaaaaacggaggcgggcaaagacacgcacaccaccgccggcacgggaaacagccagcccaacagaagaaacacgcggcgagaaaacccagccgggcagcgaaggaagcaccccgggccccaaacgcaaggacgaaccagagagaagacacggaaacagagcccacaaagccagcgcccccccccaaccgccagaaccagggaagggcagggaaggcagaacacgcgaaccgggccagacgccccacccccggccgcaaagcgagcagaggcaaggccagccaggccgcccgggaacccagacaggaggccagggggagggcagcgaaggcccgggggcggcgcggcccaaagaacgagagaaagcaccacagcccaccgggagcgcagacaaaccgacgaaaccaggcagacaggagcacgaaccggaagcaacagaagggggcccagccacccgggcagcaggagcgaggccgcagcgagccccaaaggcccccgcacgaggccgcggacaggcagcaacaagccagaaaggcagccgacgccagcgcgaaaggcagccccacggaagacgaaaagggaaccacagcagaccaagaggcccacaacgggaccagcacaagcaaaaagaaccaagaaacagcaggagaaaaaaaagcgaagcaggcgcaggaaggaggcaggggaggcaggggaccacaaggagcgccgcgccacgggggcgagacgaaccagggccggcgcggcgagcaggcgccgagggagccagcacagcccacaagaccaccaggaagaagcccacggagaaaaaacggagaagaaaagagaacaggccccaacacaagaaaaagcaccaagaaacaaagcaggcaaagacacggcgccaagaccaagcaacccggaacccacgaggagaaagagagacgcgagagagccccgggcccaccaggcaacacgcacacgcacacacacgcacacacaggaccccacaacaaaaaagaacaccaaagaggagggacaaagcaaacacaagaaaaagaaaaaaaaaaaaagcggagcaccaccgagccaggcacggcaagcccacaagagacagcaacagggccgcagcaaaacccacagcacaggaggaacacagggccccaaggaggagaagaaagacccaaggagcgaaggggcgcaacccaggaggaacaacaaagaacaaccagaccccagagccggccaggaagagcagaagaggccacggccacaagagaggagaggcccggcgcaaagaaagcacagacaggggaagccagggccaggaagcaggagggggggggggagcagggcaggggggagggaaggggaccgggaagcagaaagaaagaagaaaaacaaaaaaaagaaaaaaaaaaacgccccacaagacacaaaagaaacaaaaacaagaaacaggaacgggcaaaagcaaccaccagggaagaggggcacgggacgcaagagaaaggggacgagaggagggggaaacgaggggagacaaagaagcaggagagacaggacaaaaagcaaaaaggggggcggaagaggccaggggaagagcacccgacgccccaaaggcggagcaaacccagcaaccacaggggccacaaccaccgaacgagacgagcccccggggcgaaggcagcacaggacacaaaaaaaaaaaaacaaaaaaaaaaaaagcaaaaagggaggggaggcaccacaggcacagaggaggggggcaggaagcagaggaagggcaggagggggggcgggggagccgggacaagcacgggaggggcggcaggcagaaggcagaagaggaggaacaaggggcgcgcaggcaggcggggcacacggggccccgggacagagcacagaggcagggagggcggcacagcggaaggcaagagaagagagcggacaggggcacagcacacagcagacaggggcggggcaggccggcacacacagggccagaggcagggaggggcgaggaaaccccagagagacccgcggcaaccgaaacaaaaaagaaaaaaaagaaaagggaggccaaacagcaggaaaaagagaccacaagcaaaagcagccgaagcaaaggccaaagacgggagacaaggagggagcgagaaagacggacaagaaaagccgccaacaaaaccaaaaaacaaagagagagggagagcagcaaagggaggacacacacgccaccaccaccacacaccacacagaagaaggaaacacaggccacccaaacggagcccaagacaccagaaaacacagcgaaaaagcagggaaggaagggggcaggaacaacccgccgcccagcaccacccccacggccccccccgcccggcgccagggcgggaaaaggacaagcccgcacccggcgcaggaccgaagacaagaagcagccaaaaaaaaggggggcaaaaaaaaaaaaaaaaaaaaaaaaaaaaaggacaggggaaaacccaagcgcgaggagaggcccacagaaaggagggacagaccgagcaagcaggccgcccaggaagagaagcgcacccagccaccccggggccaaacaacacgcaacgaagcccggacaagcccccaccgcccccacaaacccgggaaagcggcggaacagagcgggcacgaagcagaaagcaaacagggacagaaaccgcagacgggccagcgcagcgcgagccgcgagaagcagccaacccggaggaaaaagcgaaaagcgcacggagcggcacaggggggggggggggggggggggggggggggggggccaagagcccacggccggagcgcgggaagcgggcggcggacaggagcccgaggggccccacccacacgcacaccagccggaggcgggaacgaaccaggaccagcgcacaaccagccaagcccccaggcccaggcggaggcaccgggcgggcagcaacaaacgcgagaggagggggaaagaggaaccaaacacggggggagaagaaacgccgaaccacacggggcagaggaggcccacaaacgaaaaagaacgcacagaccagccgcaccaccggagcacaagcacagacccaggcgacacgcacagaaacagggccacacggagcacagcacgcaaaaccacagacggagccagaacacagagaaagaaagagaagagcacccaacgcacaggcaacaacaaccccaaaacaaccgacaggcagcgaaaaggaacaacgaagaggaaaaggaaaaagccagacgggagacaaacacgaggagaaaaaaagaaaaaaaaagaaaaacaaagaaaaaagggaaaaaacaagcagggacacgcggagaaacaccagacaaagcaagggggaggaaagggaacgacccacccacacagcacacagaggaagcaggaacaaacaaggcaggaaccggaggcaggagcgagcagaggccaggaggaagcgcacggcgcccccaagcgccagcgcgcacagaaccaggaccaccagcccagagcaggggggcaccacgaggccccggggggaaagcggcccagggagggcacaggagggggccgggaggaagggcacgggggggggggcgaagcccgcccaggcaggagcagcccagcaggccccgaagagagaacccagccccccgcacagccgccggagcgccagccccaccgaggaaggaccgaaccccgaaccgaaaccaaaagagcgccggaggagcgcccacagcagaaaacccaacgagacacccccagagacagcggcaaggaaaagagcagcaggcacaccaggagaagcggaccaaaaccaacgacaaaacgcaggggaaaagccagccaacagaaggcagaagggagccgacgagcagcagaaaggaaccacaggacccaaaggcaacgcccaaaagccgccgcaaccagagcagaggacaccagagccccgcagccgggggaccggccacagccagcgcagaaaccacaaccccagggcgaggggagccacccagcccagggcaacacaggcagaggaaacccaaacccacagggacaaagccacaaccgcagaagcgaggaccacgagaaacagaacacacaccagcagaaaaaaaagagggaaacaaaaacaaaaacagaggaaggaaacagggagaacggcaaccccgggacggagggagcaggaaggggcagccgagaagagacgggaaaaaagcagcgcccaagcccccacggaagacgaaggagcggcggggcccaggcacagg

SEQ ID NO: 695 - skipped

SEQ ID NO: 696 - RNA, 23146 nt, Mus musculus
aacccgcaacacgcaaagagaggccagggaaacagacacgccaaagggaggcaagaaggacagagaacgagcccacccaccagcacaacccgggccagggaccaaccgcgggcagccgaagcagacacggaacaacagcaacagagccgccaccgaggagaaacgagagccgccagccccagcccgccaaggaacaacgagacaagaacgaccacaaggcgacaagcaccacacagcccccaccgggcagacaaagcggggccggaaaagacagggaccaacaaccacagagacagaggaaagcaagaacgccacgcgcggggcaaggagcgcgcaacgaagaacagaccccaggcacaaaaaccaggggacaaaacagggccagggaagagcaaaagaaaaaaaaaaacgcaaaaaccccccaggccgaacagggagcaaaaagccaaacaaggaagagaaaacaggaaaaggaaaagaaaccaaaaaaaccgcacaaaacacccaacccacaggcacaaagggaaggagcacgcaaagagcggaagaagaagaaaaagagagcaaaaacaaagcacagcaaggcaaagcacagagcagccaaaccgcgcacgacccaggcaggacacggagcccaagccgcaaagccagagcagaaaggggggagagcggaggcgaaccccccggaaaacagccaaagccccaccccgagcagggggacacaaaagcagagaccaaaagggaagggcccgcacagcccaaacagaaaagagaaacgggccaagcaaacaagacaaagcccaggaaaaagaaagggaagagggcaaaaaccaaccaggcaaaagaagccaacgggaggaaacaaaagcaacaaaaaggccacaagaaggaggcagagagggaggcgacacagaaaaggggaaaaagacagaaagaaagggccaaaggacgaaccgaagggcagagcaaacaacagacacaaggagagggcacgcacggacaccaaccgccagaagaagaccggcgagggagcagaaccaccccaggcagaaaagcagcaggcgagcaaaggagacagaacaaaaaccccaaccgaaaagggccaagcagaaacgcgaagggaagaagcccaccaccccccccaaggagggcgaggcgcgccggaaccacacgaagaccaggccagccgaaccagaaacgccgccgcccccgaagccgggaaaaggcggcgccaccacaccggccaggcaccagcggaaggcacaacccccgagcccaaggccccgagaggagccgagcgcaagcccgagaaggccagcccacccgcgccccccggcagcagagccagcccccaagaacagccgaaaccacaaaccacagaccggcccgggagcaaagaaacagccaagccaccgcgccaacagaacgcaccaccaaagaagaacgaggagaaggacgggagagaagaaggaagaaacaagggacgaaaaaccacacagcgcaaagcaaaaaagaacggaaccccaaaagaggcacaacacacagaaaaaaaaagaaagggggggaacacaaaaacacacacagacacacagacacacacacacagacacacacacacacacacacacaaaaacaaggggaacagaagaagcgagaagacagaaccaacacacagccagaccacgaaaggggcaaaacgccgaaggcacggggcccaaaagaaagaagaagggaagagaaagacaagagaaagagagaaggaagagagggaggaaaggagggaagaaagagggagagagagagggaaggagggaaggagggaaggagggaaggagggaaggagggagggagggaaggagggaaggagggaaggagggagggaggcccaacccccgccaccgggaagagacagggaggccacacggccacccgaacccaggaaccggcgaaacacagagcagaacaagggagaaaacccaaaacagcgcaaaccgggccaagccgggaaaaacaggcccgaccagcaggagggcacccgggggcagcggggccggcgcccacgaaaaccgagacaagaacaaccgaggcacggccaacggggggggggaaaccagggagaaagaggacagccaacacggaaaaaaaaaacccaagcacaacaacaaacacccaaaagcaaggcgacaaaaaacacagccgccagccaggaaagaaaacaggaggccaaagaacggacaccacagggagcaagagccccaaacgagggcaccaaaggcaggcggggagaaggggggcgacagccaccagaacggagcgcaccagaccgaaacccggaggaagcccagcgagcacgaagccgcccaggcagggcaggccccacgggacgccaagaaaggaagaaaacaccacccacggcagaacaaccacggaaccaccacagcgcgaccaagcaaggaggcagaggccaaagacccagaagagcgagagggcaaaaaggcagcgaaacaaaacaggacaagacaccagcagggcagaaggaagacaccgggagacacccccagaaggcacaagcgagaaacacaagaagagaccacgacaacgcaggagggaagggccagacagcaggaaggcagagaaaaaccgcaagcagggaaaaacacccacagaaagagcgaaggaggagagggaagcagagaagacccaccaggagggaagggagacagaggggagcccacgggcacggaagcagaggagcaggcacacccgagagaccagagaagaagaacagccagaagcaggaaacccccccacaaggcggggaacagggaaaagccaccccggcaccccagcaccagcgcacccaagcaccgaaagcgaaagcaagggcacacagagccaagacgaaagggacagaacgccaagaaggagaaagcaagcagaaggcagaaaccaagcgccccgggccaaaaacgcgaccccgcaagcaccaaccacaagggggaacacaagagaagcacaaacgcggggcccagacgaagcaaagcaacggccagggagagaacccgaccggcccaacgcgagccaagcaacgagacacgcacaaggcaaaacggcgaccgaaacccccaacacggagcgggaacaaaagacccggagagcacagaagcgagaagagagacaaaagaacgcaaaaaaaaagggaagagacaccccgacagaaaggcaaagagcaaagcacccacgagggccgggggccccgggaggcaccagacgaagcaaaagcacaaaccggacaaggcaggggagagcagaccgagcaagcacacaacaaaaaccagcacacgccagccaggaaaaaaacaagcaggaaagagcgacacaaaagagcagcaacaaaacgaacaagcaagggaaggacaaagccaagcaaggaaaaaaaaaagagccgccggggagggcgcagagaaagggaaacggccaagcagcaggggccaggggaacggcgcaaaacaaacccaccacaaacaagaagcaaaccaccacaggccacaaacagggcagagaacaaaacacccaaggacacacagcccagccacgaggggaaaaaaccaaccaaaccagccagccaagaacgcgggcccagaaacagaccaagcaaaaaaggaaccccacaaaacccaccccgcccaccccccaaacacaccccaagaccccaacacccccacccccccccccccccccggcaggggcgcacacagcagacacagcggcagaggccaaagaaaaaggaagggaagccagaaccggccgaccggcaagcaaagcacaagccagcccgaacaccgccaggagagaaaacgggggaacgcgcgaaccagcagaggcaaaccgcgacacacaaaacaggaaagccccacaaagacgacacacaaagccacaaagcagaggaccccagccccggcaaagaggccccgaagagaaaacccagaaccaagagcaaaggagcccaccacacaaggcagccaccccacacgcagaggcagcccccaagcccccagcagaggccaaaggcacaaaccaaccagaggacagggaggagacagaccagccagacgacggaacacaggaaaagggagacagagaaagcagaggcacgcgagccagaggaaaggaggaaagcagagcgccagaaaaacgaggcagccgagaaaacacaagacaggagggcacgcaagaagaccgaacaagagagaagggggcaggagggaagaacagaaccaccaaaaggaccaaagaagggggacgagccaaaggccagcacggagggggcacaaagccaacaagggagaaaaacaaccaaagaaaggaaaaggggaaagaaggaagaagccccgcagaaaggcgacagaaaacggaaggcggaaggggaagagaccgagggcagcgaagggcaaaaaaagcacaaaacaaacggaccaaaaaaaaaaaaaaaaaaaaggaaagagccaacacaccaccaaacacgcagcaaaaaccacaccaagaaaagcgaaacgaaaagcaaaaacagcagcccgcaaaagaaccaccacaccaggaccgggcaaaacagcaagacaggagggggagcacaacaggcggccacacccccagccaacaaagaaaagcaaaaccaacccggagaagggcacacaaagggcccgagagaggagaaacacacagcagagagagacaagacccaaacgagggcacacaaaaaagaaagggaagaaaagacagacaaaggagaaaaaaaaaaaagagagagagagagagagagggagagagcccaacacaagcagaagaaggggaccgaggggagagaaggagaaggacaagcagaagggggaagacagaaaaaccaagcagcaacggagcaaaccaaccagaaccccacagacacagagggcagagcgaggcagcagcccccgaagcacccaggaaagcccgcaaccggaaaagagacggaccgcaaccaccgccaggcaagcagagaagaggagcccaggcaccccacagccacacagccacaaggagcagcgcaggaaagagagcaaccgcccaccagagccacacacaaacacgcacacgggccccagcaaaaacgcggagcaaagccaaaccacaagcacaacacagaagaggaaaaacaaaaaaaaaaggacacccgcggaaaaacaggaaaaaaaaacccaaacaacaaaaagagaacaaaaggaagaaaagaaaaacccaagaaacaagcacaccagaaacaggcgaccagaaccgacggcagaaagacaaaaaaccaccccaacaagacaaacggacacaaaggaggaaaaaagggcaggcaagcaaagcacaccaaaaaagacaacaaagagcagcaaagcacaaaaacgaccaacaacgacggagcaagggaaacagaaacaaccgcagcagcacccaaaaccagcgggggaaccaagaagccacagaagaaaacaaaaaaaaaaaaaccacaaacgagcccgagacccacccacacaaaccccgaacacaaagggcacaggccggacaaagaggcaccacagcacacagacaccccaaccacccgcccacacaccaccccgacgccagccacacccccccaccccacccgcccacgggagccccagcccccaccccaccgacccaaaccccggggccccagccgagggagggcacccgaagaacacagacccgaaagccacgaggggcgggccaaggcgagagcgcgggggcccagggaaagacagaggccagaaagagacgcggcccccacagggccccccccagcccagcccccaacaacaacaggggcagcgccgccagggggcaaaacgcaccgacccaggagcaggaagacaggacacaaggagggagggggccacccacagacacccgacccaaagccgcgaagaaacaaggaggaaaggagaggagcccaaggaaaagaaggccagcaacaggcccaaaggggaccaccaaggggagaccaaggccggcacagcgaggcgggagcaccacaaaagaggacaccaggcacccccaaaagacccaagggaccaaaaacccaaaaagaccaggcacccacaccagaacacaagcccaccagacacacccgacagcccaggacaacagggcaccaaggaaccacaggccaaaaaccaccaaaaagaaaagaagagagaggggaaaaaaaagccaaaagcacggccagggacggaagcaccacccaggaaagcagacacgcccaggcgaggcaagaagacggccaaccagacacagagggcccaggcagagaaaaaaacccaacaggaggacacgaaccaaagcacgaccagcccccgaaaccaaaaaaaaagaaaaccaggaggaaaagaaaacaacagagacagagagaaaacaagaaacaaaccgcaacaggcaaacaagaaaaaaacgagaaaacaaaaaaaaaaaccaaccaagcagaagagcagggaagaaaagccagaccaaagaaaagacggacaccaacagaaacggggacagaggcgacccagcaggcaggaaggcaggggcacaggaacagaagagccaggcagggaagaagcaacaggggaggcagagcaccccagggcccgacccgccacaaaagggaaaggggggggagggcccgacacaccaccacaccacgcaaacgaaggaccggcagcccgggacgccgcgccacccagcgggaaagaggggagcagccagccagcacaaaaccaaggaccaaaacagaccccacgccagcaggcaagcacacccaagacgagccgcccccaagccgcaccccgcaccacggggcccacggccggaacacaccaaaaggcaagggggacaacccagcaaccacgcccaccgaagcacggggaagacaaaccaccaacagccgacaggggaacaagaaccacacagcaacaagccaaccccaaaaacaccaagaagaacacacacacacacaccacaccccccccccccccccccccccccccccccccccccccacacacacacacacacacacacacacacacacacacagaaaaaagacgacaccccgccacccacccgggccagccagccccccgaccacggcagccccgcacaggaaggccaccaccggaaaagaaacggggggccacaccccgaaaaaacgaacccccacagcaaaaacgacacaaggcccgcaggaggggacgagcccaccgcaaaaccaaaaaaaacgagaacgaaagagaagggccaaaagagacaccgaggcaagacgggacgaaagaaaacagacaggaagcagaacaccgcagcaaaaccaagacacaaaggaaacgaggcccagcacaaacaaaagaaggaaaaggcaaacacgcaggcaaacaggcccagaaaagcaccaaagagggaacaagcagcccccgcacacgcaacaagacgaagaggaaagagcagaaagcacgcgaggacccacgaacacccagaaacagcacagaagcacaaaacgccagacaagggaaacagagacagaagcacaaaaaaacggaaagcaccaaggcaaagggaaaggaggagagaaccgaaacggcccccccaagaccaacgagccagggaggcaagccaaccggaaggaaagcaacacccaagacagacacaaaaacaggaagaaaaaaagagagaagagacaagccaaggcagcacgcacgacaaaaaaaaaaaaaacgcaaagaggggggggggaagggaaaacacgcagaagaacaaaaaaaaagaagaaaaaaccacaacgaaaaaacaagcaacacaaaaaaaaaaggcaagaaaaaaaacacagagagagcgccagaaccacacagccacaccaaaaagacaaacacaaaaagaggcaccacggaacacagaagggagacagcaacacaaacagaaaacaacaagggaggcaagggggaagcagacagggggcggaaccagcaccgaggagcccagaaaacaagaaacaggcagaaaccgagcagggcaaaacgggagaaccaaagccggaaagacaaagcacaacccgggcccgccggccagccggaccaacaacacaacacaggcaaaagccccgaagacgcaggaaaacaacgccgcagcccaaaccaagaaaacaagagaaggcggcagaggagcacgagccgaccagacaagcgcaccaaaagcacaacacaaaagcacaacaacaagggaaaacagaaagaaaaggagaaaggagcccgacagaggacgacgaggcgccaaaccaggcgaaacgaaaaaggaaagaaacccacacacgagccaagcaccaccacccaagcagaagcgccgcccccccgcacagggcccgagcgcggggaggccaaaacccgagagccccggggcagagagaaaaagcagaaggaaaccgagaaaaaaaaaccaacagcagaaaagaagccacaaaagcaacagaggaaagagcacagaacccaaaacaacaaaacagagaagacagcaaccacaaacgaaaagagacaaggagcacgaggacccaaaagaaaagacgcccaagggcagagaagaccaagcaagacaaggacagcggacccaaccaaaacggggcccgacaaaaccacccagcacgcacgaaagagcaacagcccggaccagcccaaaggacgccaacaaacagcaagcaaccaaaagcccccaagccacccacccccccccacccacccacccccaggcccggcgccccgacggggcaaaaaggcggccaagggccccccaggaggccgacaggccacgagcaagcagcagagcaagagcccggggacggagcaaaggccaccaaggggcagacccagccggacccagccccagggggccaggaccaccaaagccgacggagcaccaccaggcaggcccaggcaaccgacaagagacagcaacagggcccagcaaacgcaggagcaagggcagcaggaagcgaagggaggaccccggaagcaggcacaggccaccaccagcccaaacgccgaacccccaagggggcccaccaaggaggggcaaggcacaccagccacgagcaggaggaaagacaacgggacagggggcaaaccacacaggagacaagggagccggaaggacccaccaggagagcccccaggccaccaggcaggaacaaaacacaaagcgagagacccaggagagaccacacgaccacccggaggggcacgggccccagccggcaaaaaaaggcgcagaacaagggagcaggcccaccagggggcaccggaaagcccaggagaggagcggaccccggagacaaccagcgaggaaccgccagacgaccaaggggacaagccgcaacccaccaacaaggaggaggccccccacaccacgccagcacgcgcaccgaagacagccacgacggggaggggaaccagggggagcacccgagaaaggaggagcacagggcccgccacggacccagggagaacgcagcgagccccaaaggggagacgaagccacccgagcaaagggaaagccccacgaaggaaggaaagacccccaacgggggcgcagacgggcgccgcagaaacggagcaaggcccagcaaccgacacaaagaaaaccaaacgaggagggcgagaaaacaacaagaagaaagcccagcagaccacagagggcaaagggacaaaaccaacaacaaaacagaaagaaaagggagacaaacaacagaccgaagaaaccaaaacaccacagacccacaaaagcaaccaacaaaacggaaaaccggacgaaaggacaaacggacagaaccaggaccaaaggaacaggacaaggacccaaacagcccaaccccaaagaaaagaagcagaaaagccccagccaaaaaaagcccaggaccagagggaggcagagcacagacccaaagaagacaaccagcgcacaaacacacaagaagaagagaaggaccacccaaccaagaagccacaaccgaaccaaaccacagaaagaccaacaaagaagagaaccagaccaaccagaaacgagcaaaaacccaaaaaaccacaaccgaaccaagaacacaaaagaaacaccacgaccaagaggaccagggagcagggaggaaaacgaaaaccacaagaaccaaaaaacaaaccaaagacaaaaaccacagacaccgagagcagaaaaagcagacaagaccaacacccacagaaaaagggaaagacaggaacaaggcccaaccaaacaaaaaaagcaacacagcaaaccagagccaacacaaagaaaggagagaagcggaagcaacccacaaaacagggacagacaagggcccacccccacccaacaagacgaagaagccagagcaacgacaacaaaaggagacaaggggaacaaaggaaaagaggaagcaaaaacacgcagagaagaagaaaaaggacccaaaaaccaccagagaacccaaaccgaaaacagcgggaagagcggaaaaaaaaccaaacaagcaaggccccacacaaagaaaaacaggcgagaaagaaaagggaaacaacacccccaaagcacaaaaaaaaaaaccggcggaccaacaaggaagaaaagacgagaaaaaaccaagccgaagaaagaaaaaagaagaccagaagaggaaagaccccagccaggaggcaggacaacagaaaaaggcacgccaaaagcaacacagacaagcaaccccacaaaaccaaccaaccaacgaaagaaggagcaagcaaacacggaaaacaaaaaaccaagaagcaaaaaccccaaggaaaaagaacccggggaacaccagccgaccaaagcacacagggcaaggaaaaaacgcaggacggaagagacagacaagagaccaaggaaagaagaagacccagaaagaacccacacaccaggcacgaccgacaagggagcaaaaccaccagggaagaaagacagcacaacaagggcggcacaacgggacagagaagaagcgaacgaccaacacccgacaaggcaaacaagggacaaggaaccacaaaaaccagagacacgaaacaagaggagaaagggggaaaagccgaagaaggaccagcgcaacgagagcacgcaggaacgaggagaaagccaagacaacagaaggcaaagcccgaggggggcagagaaccaagggcaacaggcagagcgaggcgaacacaggagacaaaccagagggacaagccaagcagccgccaaggaagcaaaggaacgaagaccacagcccaacggcaagaaagaacagaccccacaaaagccacaaaggagagaggaaacacaagaaaagcaccaaagcaaaccgcaaaaagaacaaaacaaaaagaaaaacaaaagaaacaaccaaaaaaaaaaagggaaaaaggagcacgaaaaaaccaaaagagcgggcaggggaacaagccaacccaacccccagaccagggacacggacagggcaggcacccacagaggagacagccaaaaaggaaagacacgaaggaagggagcgcaagcagcacagaacgaagcgggggccgaggccgaaaacaacagcaagggaaaacaaaagaccaaacaaggaaagagcaaaaaacagagaggcggggggaaggcaggagagaaagacaaggagcgaagcggggcgacgagcccaccagcgcgagaggcgagagaggccaaaagcggacagaacaacaaacaagccacaggaccaacccagggcaagcagcccacagcagaacagacagaggaaaaacccgccaaagcggagaagccggacagaagcagggggccggaaaaaaaaaaaagaacagagagccacgaaaggaacaagaccgccagaaaaagcaagagaaagaaccagaagagagaaaaacaaacaaacaaacaaacagacaaacaaacaaaaaacaaaagaaacagacaaaagcggagcaaaaaacacagaaaacaacaagaaccaaaaggagggacagcccagggagagaacagaagagccgaacccacgagggaaacaaaaggaggcgaacaagcaggcgacggcagaacggaggagacgaaaaccggacaggggggacgggggaggaaaggagcaagagcaagcaggaaaacaagacaaagcgacaaagacgcagacaggcaacccgacaggacagaaagacacaaagcagccgagaccagcaagggaaggaaacaaacacaacacaaaaagccccaaacgcaacaagacaagagagacacacaacacaagggccgcaccaagcacaaggagacagccaagaaagcaccaggaagaaaggaaaaaaaggaagaaacacacaaaaaaaaaaacaaaacaaagggaaaggggaagcaaaacaaaagcgagcaaaaaagagcgaacaaaagacacaaccaagacagggccggagcccggcgccggaacaccaagaccaggcggcccgaaccagaaaccaccgccccgccccccaggcgggaaaaagggggccaccaccacccagcaaagacaaaaaaaaaaccaacaacccaaacccgaaaaacagaaaacaaaccaacaaaacgagcgagagaaaaaacaagaccaaaccaaggaaaaaaagagaaggcaggaaggaggaaaaaaaacgcagggaaaaacgaggaacacagaaccagaaaaacaaaagaaaacagaacaaaacagcaagaaaaccaaaccaagaagaaaagaagcaaaacaaaaaaagggcagcaaagaagcaccacacccagccagagaggagacgaaaaaaggagaagaaaggacgaacagagaggccacagaaaaaagaaccaaacacaaaagccgggaaacaacgggaaagaaaacaaggacgcgaaaggacagaacacaagcccaaaagagaaaaagccgaagaaaaggcacccccagggggggggcaaccaacccagcacgcagaggcaggcaggccgaggaacagccagaacaacaaaggaaagccgcgggcgcagagaggccagcgaaagagcacgacgccaggaggccaagcaaacccacaaccacgggggccacaaccaggaagagacgagcccccgggagcgaagacagcacaggacagaaaaaaaaacaagccaaaaaggaagaaaggaggggagagagaaagagagaaagagagaaaaagagagaaagagagaaagagagaaagagagaaagagggaggggagggagggagggagggagggaggaaggaaggaaggaaggaaggaaggaaggaaggaaggaaggaaggaaggcaggcgccaaacaaaaacaaaacaaaacagcaagaggagaagagaaaaacagcaaagacaaggacaaggccaggacggagcacgcccggcgagaggcggaggcaagaacaggggagaggcaaaaggagagagacaagagccaaaacagacagagggcccgcaaacagagagcacggggaaagagaaccccaacacgcaaagcaaccaagccaaaacgggagagcccaacaagacaccgcccaagagcaagcccagagccaacacaaagaaaaaaaaaggggcacaggagcaaaaaggggaccgccccgaacaaaaaaaacccacaagcaagaccaaaagaaaaccaccgaagacaaaaccaccgggaacaggagagaacgggaaggcacacaaaaggagaaagaaccacgcccccaggagcccggaaaaaaaccaccacccagacaagggacaaagaacccccccaagggagccaccacacacggaacccccaaaacagccccaagcacaaggacagacaaaagcggaagcgaaacccgggaaagcgaagcacaggcacaacagccagcaacgcaccacacacaagcaagcaacaacagaaaagcgaaggcgagggcaaaacgcacacccagaaagcaagaaaggcagcaaacggacgcgggaaaaaaaaagggcaggcacagcgcacaagcaagaagcgccaaggaccacaaaaacaaaccccagcaacagagcgggccaaaaccggagcgagcaggggcgggcgccccaaaacaaagaaagacaacacacaccacgagcaaggcagagcaagaaaaacaagccaacgcaccaaacccgaaagagacaagcaaggaacgaccgcaaaagacagaaggagcaaggccaaccaccaacccagggaacaacaaaaaacaaaaaaccagaacaaccagagaagaagagcaaaccaaaacacgaaagagacccagcagacacagacagggcaaaacgagagcggcagaaaacaagcaggcaacaaacgagacagccccgcaagcacaacagaacaagagcgaaagaaacccagcgcccaaaaaccccgcaggcgcgccagcagcaccagcagcaggaaccccgcaaggaagggaaacaaacacaaagaagagacaccccaaggaagggccacccacaacacgaaaaccacagaggcgcaggagcccgccaagcacagaaacagaaaaaaagaaacaaaaagcacggaagcaccaagcaagaagaaaaaaaacccgaagaacacggagaagcacgacccacccagggggggcggaaaaaaagacaaagaagagaaccagacagccacacccaccgagcacccccaagccggccaaccgaacgcaaaaaagcagacaaccaggccacgccacaaagaagcaaccaagagaacgaagcaacagaagaaaaaaaaaaaaggagaaccagaggaagcacacaaacaaacaaacaacagcagcagcagcaacaaaaaccaggagccggggccacaaagcaaagcaagaaagaaagcacacacaggggcaaaaaaaaaaaagaaaacaaaaagcccaaaaggaagcacagaacacagaaaggcagcaacggacaaagcaaacgaccaaagcaggcagaaagcacacaagccgacccacagagcacaacaacgcgaccaacaagcagcccaacgcggacgacacaccaacaggagcaaaccagacaccaagagacacacaaaggcagacacaagcacaaagagaaaaaacagggcccgaggaggaccaccagcgagaaacagaaaagacagcaggcggccgcgcgcacgaggcacgcaaggcccgagcccgcccacagcgggacaaccagggagaaaaacacaaacccgccaaaccaggggacgaagccacagcaaagagaaagcaggacaaacaaccaaagaagaagaaccgagaaaaaaagagacggggcccccgggaacgaaacaaacaaaggcggggaaggaaagcacgggaacaccggcagccacgaagaacccccaacaacgaacacgcacgcagaaaaacacgcccccccaaagcggggaaaagccccccccaggcacgccccacccgccccggaaaaaaaaacgggaggccagacccccccacaaaaaacgacccacacaaaaaagaaggaaaaacaccccagagaaagacacaaagaaagcaaacggggcaaaaacaacaaggcgggaagaggggccgggggcaaaccccaagaagccaccacagcgcgcagcacaccccggcaaccagagcacgcccccaacagaacgacccacaaaaccaacccagccccaccagcccgacaaccacggccggggccgcccaagcaagccggccggcggcagcagcgaggccgcgccgcgacagaagacacccacgggagaagaacacaaagccacgcacaccaggaaaggaagggaaccacaccagcacgaacaggcgcggaaaaaagaaggcccgcaggccaccaaccgggacaacgagaggaaaaacagacaaaaagcggaaaaaggaaccagcaaaccacagacacaaaccaaacccagacagggacagcccagcgcccccaccaacagcagcggcgcacaacaggacaccaaagagggagggcaccccggcggagggaagccaaagacaagaaaggaggaagcagaacgaagaaaaggcaagcaaacaacaggcagggaggagaaacaccgaaaaagcgacaggagagggccacagggggacacggggagagaccgagcacaccacagcagcagagagacgggaaaggaaacaaacacgaagggggagcgcacaagggcaaaggaagcacgcaaccaggcgaacaaccccgcacccaaggcgacaccgggaggcagagccaggccgaaggaaaaacaggcaggccagcaccagaacacacagaccccaccgacacccagagcgggagacaggccaacccagccaagcaacaaagaaacagccaagcccaaaacgggcgccccaccccacaacaagccagcccaaaaaccccaaccaaaaagaacaacacaaagaccggacagcccaacccccccccaccgcccccacccacccaccccaccggcccgggccccgacggggcaaaaaggcaagaccaggggcccccccaagaggccaacaggccacacacacagcagaagagacacaagagggggaaggagcaaggccacgaaggggcagacccccagcccgggacccaagcccccagggggccagccaccaagagacggagcaccaccgagccaagcacggaaagccgacaagagagcaacagggacgacgccagcaaaacgcagaagcaaaggcgggggggcgaaggagacccaggggcgggccggaagccacccgcagcccaaagccgagcccccagggagcccacaaggaggaagaagaaccacaggggcccccgacagggcaaagagagacaggcgggaaaaccagacaggaggcagcaggaccggacgacccacgaggagaagccccagaaaccagcccaagaacaacacagaaagcgagagacccagcaaaagaccaaccgaccacccggagggacacgggcccagccggcaaaaaaaggcgcagaacaagggagcaggcccaccagggggcaccggaaagcccaggagaggaacggacccagaaacagccaacgaggaaccccaaaggacccagaggggacaagcgcaacccaccaacaaggaggaggccccccacacccgccagacgcgcaccgaaacagccacacggggaggggaaccaagggaagcacccgagaaaggaggaacacagggcccgccacagacccagcacagggagccgaccccagaagaggagaacggagccagcacaagccgaaaggaaagcccacagaagagaaaaaccccaaagggggccgcagacagggcgccacagaagcgcaaagaggccagcagcgacacagcacaagccagcgcgaggaaccccggcccaaccgaggcccccaccccccaaacaggccgaagggaggcgagcacagaccagcgaaagagaaagaaggacaacccaccacagaaacaccaggccaacaccagagaaaagcgcaccacggaggaagccccgcaaagacaaggaccaaggggggacacgggccaacaccacgacaccgcgcagaccagaccagcagacacaacccggaaacagcaaggcaggcagggacagcagaggaaccgagaagaggaaccagaaccagagaagcagagcccaacgaaagaagagggaagaggggagcagaacgagagcggcaagaagcaacaaggaccgccaaccagagcagggagacccaaccgagaccaaccagagacgaagcacaacagaccaccaagagagcacaccaaggaaaacggacaaggaagggggcccaacccagccagaccggagagaaaggccagaggagaaaaccagcacgcaagaagcgacagaagggccggggaaagggaacaaaacacaacacgcaaaaggaagaccccccaaggaccccgacccggcaaagcccgcaggaccaagacaagaaaaggagggagaaagagggagccgcaccccgaagggagcccagccccaaggagggccacgggcgagagcaaggggagggccgaaccgaccaagacaagaaaggggggagcaaagcccagcacaaagagagacagggggcagaagaaagggaaggaggaccgcaaaaaccacccgcaaacgggagaagccacgagcacgaggagacggaggaagaacagacggagagagcagaacaaagggaaaggcgaagcccgggacggggaggcacagagaagggccaagaaaaagggagaggacccgcagggaaaagaggagagggaaagccagaaggccgaagaaccgcaaaacccacggccgggcgggggagacagagaggccacaggggaaagggacgggacgaacgaccgaaacggaccggacgcaggaacagccacaccaagcagggagaagccgagagaaccgagagggacccaggcggagacccacgagagaggaacgcccggccccagagcggcaaggggacacgaccaaagaaccagcccgggggacgaaagcgccacgagacagcccgaggaaccgcccaccccagggaacccagcagagccaggggcgcaggcgcaggagccccagcggaggcaccagggcagagccccaggacgcccagggaaggggaggagccaaaaaccaaaaagcaaccacaccagaccaaggaacagagcagaggggcagccaggaagggccaaagcgcagaagacagccagcgcaggacagaaggagcaaggaaacaaagacggagaccgggaccaacaaggcagcaaggaggacaggggcgagaagaaggaaccgaggaaaaaggagagacaaaaaccagacaaccgaggccaggccgagcgacccaggcgccagggagaggggggggagccccacaagggagggcaagggcgagcacgaagcaagaagggcgcccgaggagcaagaacagaagacagcacggagaaccgagagggaaggcccccacgaaacgggggaaggaacgaaagaaggcacccagcggccagaccagcggaaaagccagcccaccgaggaggcgccccgagggggccgaagcagcaaaaggggccgggagccagcaaagcagcaggggaggagccaagagaagagaaaaaagaaaagaaggcccgagaaaaggggacgcgcagcgcccgggaaaggaccgccaggggagcgccgagggcccaaccgaagggcggaccagaaagaaaggaaaggacaggaaacggcccacaggaagagagggcgggaagagccgggcggcaggccagggcgcaaacacgcaggacacggcacaagccgggagaagcgggaacgaaggccgccaagacgaccccccacgcaaacacaaggaagggaaaggcaggaggaaccggccagcaggagcgaagcacgagcagggcacccagggggaagccaaaagggaagaagcggcccaaggaaaaccaccacaccaaccgagcggcccgggccggacggaggagaggacgcagcacgaggacccagccaggaaccgcaccgagacccccaccgagcggcgagccaacaggccgacccaggcacccagagaccaggaaaagaacccaggcggagggcaaccacaccgggggccgaacaaggaccaccagaggcccgacaaggagaaacgccccgagcccaccagcacagagaagaaagccaagcgccagggggggaccaggacggcgagggggaagcgggcgagagagagggcggcgagaagacacagcccaccacggaaacggagaggaagagccggggagcgcccggacgagcccgcaacagccgggagccagcccccgaggccagggcagagacccgcaggcaagcccccgcagggaaagcacagaggcggcgcagaccacccaggcgaagagaaggcccaaaaaagggccgcccacaggcccgcagcgcaggccaccgcacagacggccgagggacccaggacaaaaaggcccaccaccggggcagagccccccaggcagaccccccccggcagggaagggccggagcgcccagaagcgggccgccgccagaaacggggccgagcacacccaccggcagaccgccgagggacccgggacacaagaggccccaccgcccagcggcaggcccccaggcggccaccccccggggggccagacagaggaggacgagcaaaaagggccagaagcgaccgcaaacacaaagaacacacaccgccagaacaagcacacaccagggaaacaagagggggggggggggagaggggggcgaccccaaggccgagcaaggggagaccgcaccaaacgcaaacaacagaaacacgagccagcaaaaacgacaaaaagaacaaaggaggaaggggcagcaagccagaaagcccaagggggaaacagagcaacaggacgaagcaccaggacgaccacaggagagaagaaaagcagccagacggcgccagccagcccaccaacaagcagaaaccaaacagggaaggagccacccaacggggggccccacacaaaaaagaaaacccaacagaacaccacaagaaaaaaaacagaacccccgagaccccccaagaacaagggccaggaaaaccaacgaaacaagacaaaagacacaaaacaaaacaaaagacaaaaacagggcccgcagcgcaggcaccgcacagacggccggggacccaggacaaaaaacagaaaggagaaagagcacaaaaacaagagaaaagcaaacaaacaacaacaaaggagaaagaaaaaagacaaacaagagaaagccaaacaaagagcaaacaagagaacgaccaaaaaagaagcagagcagaaccaacaaccccaacaaaaaaccgaacacaaaagcccaacccaagacgggcaaaggagggacagaagacaaaacacaaacgcaaaagaggccaaaccagccaaggcagagcagaacagaggagacaaccaggcagcggagagaaccagacggcccgcagaagaagacccacccaaagcaggagcacgcaggagagacccggacgaaaaaaaggagaaggcaagcagcgcaaacacagacgccaagacgagaacacggcccccaccagcccgccaccagggcacacagccccaaacgccagcccaaaaacccaagagcgccgcagaagaccaaagaagagaaaaagaacacacacacacacacacacacacaaaaccggaccaggaaaagaacaagcccaggacaaaaggaaaacaagcaaaaaaaaaccccacacaaaaggacaaaacagaacaaccaaaacagagaaaagcaggacagaaccccgaacagcaagagaaaagaagccaacaaaacacccccccacagcacagaaccaaacacaaccgaaaaaaaacaaacaggaaaaaaaccagccggcaacaaaaacccaggccagccacaggacaaggacagcacgaaaagcaagaaacgaacaaaaagcacgcagcaacaacagcaacaaccaaaaaaagaagcaggaaccagaagaaggcagacacaccaaagcaaaaagcacaagaaagacagcaaaggccaaaagacgaaggaagaaaagaggcgcaagaagccacaacgaccagacccacaagcccacaacaaacagaaacccaggcaaccaaagaggaccaagaaaaaggcaaaaggaacaccgaaaaaagaacaaaccaggaggaaacccggaggcaggcggaaggaaacgacaagggcaggagaggggagggggagaggaagaggagcggcccgagaggaagagaaggcaaagaccaagcacaaccaagacaaccaacgacaggggcagccgcgccgccacccggcccagcagccgggcaaaagcccagagaaacagaacaaagcaaccacaacaaggcaccaaaccaaaccaacagaagcaccaaagcaacggcacaacaaagcgcgcaagagaggacagacaacacagaagagaggggagcccgaacacgccacacaaagcccacccacgagaagaccaggaagcgcacgggaaccacagaagcacgaacagcaccgcagcgagggaggggagaacccagggaacaaacaaggaagacaaagcacacgagccaacaaccaacaacgcaggggccggaaaacccgacaagaaagaagggaaaaagcacagagaaaagacgcgagggcagaagacacacaccaaaacaacgcaaagccaaacaacagagcaagcagcagcacaagcaaacaacccacacccccgagaagcaaaccacaaagaaccccggcaaggaccaaagacacaaccacaagccacaacaaaccaaaaaacgagaacaagaacccccagcaaccccaaaagagaagagcccccaaacgaagggggagaagagcgaagaaaagagacagaaaacaggacaccaaaccgaaagacgaggggggccgcgagaaaaagagaagacaagggaaacgggcagacacaccacaggagagaagaaacacgagaaaaaaacacacagcagaaagacaagaacacgagacacccaagaaagagcaaacaaacacaggcccagccggggcacaacagacccagcacccacacagacgcagccacgggagaagaccaacagcgcacccccggccccagggccggaaggcagccaaaaagcccaggaaaaccaacacggcccggacaccaagccccgccaacaacaagggacaaggacacagaccagacaacaaagagcacggaaagaacaccaacgcagagaccccccgacaccaaaacaggcaaggggagcagagacgacccgagaccgacaaaagaaacgaagaaaaaaaacagaaagagaaagaccaggcagggcaagggaaagagcaagaggagagacaagaggacaggccaaaccgagccgggagaaaaggaccaggacagccccgcccccccccccccaccaacagaagaggcacaaaaggaaaaaaaaaagacgaacgagcgaagaaaaaaaaaaaacaaacagcccacgaaagcagccgggaaccagggcaggaagcaccagaacacggcccacccccgagccccccacaagacaggcaagaaagaa

SEQ ID NO: 697 - RNA, 1652 nt, Mus musculus
cagcccccccaccccgcccccccccgccaaacccagccgcgcggccgcagcgcacccccagggaggggaggggggcaaccgagcggggaggcgggcccaagaccggggcgcccgagaccgacccacgggcccggggaaagcccacccacccgaagggaaccccacggaccagccccagccgcagcacaggaagaccaaaccaccggcccaaccagggccaacgggcccaaggccagagaagagcgggggcaggcaagggaggccggacagcaggaggggcggggccagagccccaacaaagaggcaggagcaagaccggaccacagcccacggggacagcacaacaaaccgggggggggggggaagcgggaaccgaacccagggcgcgcaccagagcaaaccccaaccccacaaacacagaaaaaaaaggaaaaaagccgggcggggggcgaacaccaacccgcaccgggaggcagagacagaggacgagcgaggccagcggcacaaaggagcaggacagcgggcaacagagaaacccgccgaaaaaccaaaaaaaaaaaaaaaaaaaaaaaaaaggaaaaaggccgagccccccccgaaaaaacagccagccagggaggagggccagagagagggaggaggcgagaggggagaggggcgaaacaggagacggacggcaaggggcccaggcaccacgcaacaggccgccacgccaacacacggaccagcgaggagcaggaagagggagcaggggccgccaaggggagacagagacagaggcgggggagggaggccgcaagggaaggcggggaccgaggccagggaggaggccaggcgccccgggacaagacggggcaacggcgggaagcaccacccaggaggcagcaaagaggggagagcccggagggcgggcaccgaggccccgagaagggagagaaagggggaaacccggagggggggggagggagggaagaaggacaaagaggaaggggcgggggaagaagaggccacggcgccaggagcaccacccacaaggcccagggcgggccccagggggccacaggcagggggagcggcccgggaagacacggaggggagggggcaggggccaaaagcaggagcggcaagaaaagcaggggccgaagaaccccgggacagacagacaggcagcacccaaaagagaaagcacacaacagcacggaggggaggccacaggagaggcacggggccggagaccacgccacgccgcggcccccgccaccgccccacccaacacaaggaaacagggagcacccacacgccccaggccaggcccccgaaagacccaggccccccaaagcacgggcccgaccccgaacggggagacaccacagccgccccgaagcacgccggaggaaggggggggccggaggggggccggccgcacgcaggccgacgggggcgagaagggagccggaggagggaagggcacggggccccaacacaaaaagaaggacggcgcgcgaccgagggggggagccccggagcccgggaacagaacgacgcagaaagacaggccgcgacagagcagaagaccggccgacaagacacagccggggggggaaggcgggccaccggaagagacgagcaacggaagaaagggagagagaccc

SEQ ID NO: 698 - RNA, 804 nt, Mus musculus
caggacaagggcacaccggaaggaccagcgcccagaggcaaccagggaggacccggccacacagaaaaagccacggacacgcaggcggagagacccaaagaacaacccaaagggaccacaaagagggagcaaacaacacaaaaaacacaggaaagagcaaaaacaaaaacagacacaacaaaaagcaggacagacacaccacgagaacacacccacgagcaaagggcgaaacaccacccacacgaaacaaaagcagcggccccagccgggcacaacacagaggagcccgcacaagggaagggcccacagccccccaccccccaccccacccacccccacacagacccagcagaaggaaaagaagaaacccaacaaacagcagccaggagaagagagcagcaggcccccccccagagagaacagggcacgaggcaacaaaggagagcaaaacaggcacaaggaaagaaccaagaagaagccaaggcaacccagaggacacaagcccagacaccaaccaccggggaaggaacaggacaccagaagccgggccgcaaggaaggaggaagcccgccccaaaagggccaggggcggaaggaaaacaaaccgcagcccgagcacagaccgacagaaagagacagcgaggacacaaagggaccaggagagcgagcagagacccagaaaggaaacacagaggacgacaaaccaacacgacagaagccaccgagccggagggaccggagccacaacagagcaacagcacaggagacagagacggggccagcaagacgagggccgacgacgacc

SEQ ID NO: 699 - RNA, 935 nt, Mus musculus
gggaacacccaagaggcgcccccaaacagggcacggacaaaaaccagccagcagcacacacggaagaaaaaacaaacaaacaaaaaaccaagaacaaagaaaaacaaagacaacagaagaacgagaagacagagaacgggccggcacaaaagaacggaaacaagaaaaagccacaggagaagggaaaacgaaagaaacagagcaacagagagccccaggcgcaaaaaacagacaaacaaggcagagaacgagaaaagggacggcggggagagcaaacaccaaaagcagccaaaaaccccagacggccggccgggcaggagggggcaggggcagcggcaaccacaggaggggacaaaccagggcccgagagcagacggaaacagagggccccacaacgcgggacccacgcccacccgcccccaaacgacagaaaaagcaaaacagaggccaacacccacaccacccagacagccgaaggaccaacaaacgaagcaacaaaacacacaaccacaccccggacacgggaagaggcaacgagcacggcccgccggaaaggaagggcacaggcgcccgacacagaacaacgaaccccacgccggacggaacagccaccaggcaagccccagcacccagccgcccggagcgcaaagagccacccacaaacgagaaccacaccaggcagagggagaccgcagaggaccgagagccccaaggcagagaggggacggagccagaaccacagagacccgcccggcgcgacagaaagcaagggcaaggcagaccggccgagccacggcccagcgcccaggaaccgacagccaacaaggccagaaacgcgccggaaaaaaacaaccagagagacagggaagggcagaaacaggccccaagacagaaagaaaaaaggcaaaggaaccccacaacccaccagagaccaa

SEQ ID NO: 700 - RNA, 523 nt, Mus musculus
caacgcccaaaaggacagaaaaagagcaccaggcaaagacgggagggagggaagcaccacaaggggaaagaagagacgaccaccaaagggccgcagcaaaagccaccggacgggccgagaggaagaggggcaccccgagcccgcaggcacaaaaaggacccaagggcgagcaagaagagacagaggaggcaacccaggggaggaggaaaggaggagaaagagggagggaaaaagcacagagaaaagagaaaaaaaaaagagaaaagaaaaaaagccccccagaacaccccgccccaccaaaaggagccggcaaagaaaaggaaaaccgacccaccagcgcggcagccaaaaacagaacaccgggcaagaagccaggacaaccgggaccacagcaaccaaaaaagccacgaggaggacaccagagccaacaggcaagacacagaccccaagcgggcaggggcaagggaaccaaccacgcgcgacaccaggcgaccccagcaaacccaccaaacaagcggagcca

SEQ ID NO: 701 - RNA, 426 nt, Mus musculus
aggccagcccgggggagaagaggagccaacccagcaccgggaggcagaggcaggggacgagccaggccagccggcacaaaggagccaggacagccagggcacacagagaaacccgccgaacccgccccccccaccccccaaaaaaaaagaagagaagagaagggggaacggaagaaagaaaagagaaaacacgagcgcccagacacccagaagagggcgcagaccgaggaggggagccaccaggggcgggagaaccggacccggaagagcagcggggccacccacgagccaccaccagcccggaagagggcccagacggcaaacgaaaagcgacgggacaacccaccacccgcaagccggggccgaccaccacacccagagagcgcggccaacccgaaccacacagcaaacaagaccaccaaccga

SEQ ID NO: 702 - RNA, 1706 nt, Mus musculus
gcaccccgaggccgagagcggggggggcaggccaggcgcaccaggccccggacagggcggcaacaaccccagccacggccgcgacggagggcaggagaagcggccgaggaggcgaggcgcaagagacaggcgcccccaaacgacgagcgagaccagcacacgcccgggaaggcaaaacacacgcaagaaacgcaaagaacccccccggcagaggacgcggaaaagagaaaacagaagagagcaccacaccgcggaacgaagaagaacgagcagagacacagaacggaaaacacacgccaggggccgggaagaggcaggccaggaggaacgcgggcgccaaggagcgcaaacccgaagccgacgcaaaggcggcccgggccaagaagaaaaccgggccaccgaacaggccgcgacccgcgacccacggaagggcagcggagcagggaaagcagaacagcagaaagacagacagcagaacagaaccacagagcaccaccccaaaaaccggaagaggaaacggagacacagaagcaaaaacagccaggaaagcaaaagggggccccccccagaagcaggagagggccgagcagacccacaagccaacaagccagaaaaaggaccccccccgacgcccaccagcgcgggcgcagacaccgcgaagaagcaaaccacaggcagccgcagcggcggggcaaacacggaagacgacgcaaagacaaacgggcaaaaacccccgcaaacagaggggcagggggaaacccgccccgcaaagagggagcgccggaggccaagccagaaagacgcgaccacgccccagagcgggcggccaaaagccagcaaagagacgcccacggacacagccaaagaagagggcaccgaagggacccaagaaggcgcagcgggcgcgcccgccggcacgcccacggaccagaccgggggggcgcgccgcacagacagagagacaggaagggagaacgcaacggagaagaacacaggagccaaaccgcgaggccaggccccaaaggacaaggggggggagcccaagagaaaaaaaaaacaagaggagaccgcacccacacccgacgggaaggcggaccagccacccacacccaccacgccgcccagaaacgaccccagacagagccaagacccagaaaaagaaaccccccaaggcgcagggagacacaggaaaaaaaaaaaaaagaacaaggggcggagaaccagggaagacagaccagaagccagggagcccgcaaggggaggggcgcacgcgaacccagcaccggagaaggggcaggagggcagaaggcaaggcaccgccacacagaagcaaggccagcgggaaagagacagcccaaagaaggaagaaacggagaggaagaggaaaaggaggaagaggaaggaagaaaaggaaaaggaggagaaggagagaaagaggagggagaggaggaagagaaagagaaaaagaaggagaagagcaggaagaggaagaggaggaagagaagaagaagaggagaaggaggagaagaaggaggaggaggagaaagaagcagcaacagaggacaaaaacaaccccaaacaagagaaaaacgagaaaaaaagaaaaccacacaaagagaaaaaacaaaccaaacaacacaaaccaagagcacggccacacaccagccaccccagaagagagcggggcaggccagcagagcagagag

SEQ ID NO: 703 - RNA, 892 nt, Mus musculus
agccagggcgggaaggagagccggggaacaagcacccgacagacaccacaaaagcaaagagggccgggccagccccacaagcaaaagcaggcagaggcacaggagaccaagccaggcggaaggccaggggccagcagaacagcagaacacaaacagaacacagacaaagcacaggcaggcacagaaacgaagcggcggggcagcacacaccaggaaccagcaacggggcacgaagcagaagcacagaaagcagaggccaccgggcacggagaagagcccgcaacaaaacaaaacaaaacaaaacaaaacaaaacaaaacaaaacacaccaaaaagcagaagcagagaaaggcacaaagagagcggaccacagcaggccccacggcaaaccacagcggcccccaccgccagaccccacccaccagccgcagccccccgcccgggcgccggggcccgcggagagccagcccagcccacaaccagaccggcccagggccacgcgccaccccagcccgcccaagaacccaaccccgccccagggaaccaggaccccagaagaagggagagggagagcaacaccagcgccagccgccccagaaacacaaaaggacagagcccgacgaaggcgccacgagcccagaaaacgccgaggggcgcgggcaacaccccggagacgagaaccccgcgaccccacagcacacagcgcagggcccagccagccagggaccgcccaccagggcaaggagcaaggcccgagcaccagggaagggaaacaaagcgagaagccaaggacacagggaaaggagaggaggcccccgccaggagcagcacgaggagaagcgacccagaacaggcaggacgaggcagggagacagcaggggccaacgagccgc

SEQ ID NO: 704 - RNA, 2678 nt, Mus musculus
cggggaagggcagccccagcccgggagcccggaaagcgaaggaggaggcggcccgaaacgacggcccaggcaagagacccggagagacagagagggacagagagacgggggaggggggggggggggggcccgggacaggaccgaaaagaccgggccaccagagcgcaccccgggcaaacaagcaacgcgcaccggaaaaagaggcgaggccccggaacaaaccgaccagggggaggggcgggggcaacccggccccagccagaaaaggcgcaggaagccaggggccgccaagcggcccccgaggaagcgcagcagcgcaagagccggggagggaggacaaagggccggcccgcgcgccaaaacaaaagggcgggcgaaagcaagggagcagggagcggcccccccagcaggagcgaagccagcaaggaaacgagccaagggaagagcagaggcaccgaaggagccgcaagggggcaagacccagacccaaaagaccgggaacaaaaaccagggggggcacagaggggccggcgagacagggccggagcccggcgccggaaccaccgagaccaggcggcccgaaccagaaacccccgccgcccccaaggcgggaaaaggcgcccggccagagggcgcaaaccaaagaacacgggagccagggacagacgggaccgaacccaggcacaacaggcaggagacaggaggaccccccccccccaaagcacagccagccagcagcccaacagagcccaggccaggagagacacgccacaggaggcgggccgaagagacacccacaggccccacagcacaacacgggcagcaggcacgacacgaaacacgcgcaccacgaaaagaaaacaggagcaacgagaacgggaccagggaacgacccacaaaagccgcgcagaaacggcaaacagccgaaaagagaaggcaaaaaggccacaggcaccacccgcccgaagacgccaaacacaaggagcagacaaccggaggcccgcgcggcggagaaggcgacaggaggcgagaacaaaccaagagaagacgcaggggcaaagaaaggcggcacagagggcagcaaagacacagacgcacggcacggaaaggcggaggcgagaggacaaaccaaggcagggcacggcgccagacgggggaagagaggacgggcggaaaggggacggaagagagggagcagagggggggaaagcccaggggcaaacgaaagacaaggggccaaggacgcagccccggaaagagcaccaaggcacacaacagcgccacggcgaacgcagccaacagcacacaccggggagggagggcccaagagagagaacgcaggagccacccaggacacaaaaccaggagacacaagcgaaccccccgagacaccccgcagcaaaccccacgccaggcaggccaggacgcaaaaacaggcacccagaacccccaaaggggaccacaccccaaggaggagaaaaaaaaagagcaggcgaagcgccaacaaagccagaagacgggacacagaacaaaaaccgaagcagggagaaagaagagccaagcccgccagggcccccgcgagacacgaaacacaaaaagacggaagccagggaaaaaaaaaacaccaccaacaaccaggggccgggacgggaaaaaaacagcgccaaagaaaaccaaggcccaagaacaagggagccgcccagcggggcggcgaacgcgaaacacccgaaggggaaagcccgggccccaaggagaaaaagaacgccaaaagcaaaaaagggaagggggggggggggggagcggggaaggcccaagagccagacggggccacccggagcagagaccagggggagcgcgaaggggcgccagaccccaccccagggccgagaacaacagcaagcaagcaccaacccagaaccacgacgccagacacaacaaaagcacaacacagcaggagcaccgcagcaggagcaccgcagcaggagcacggaagaggcagccgcagagcacccccgcgaggccggaccacgcgcagaacccgcgggagccacccgccagcccagaggagagccgcagagacacaggggggggggggcaacccccccagaggcggccacccccaaaaggcgggcagggggcgcacgccaaccagcacggaggcagaagcaggcagacgagcgaggccagccggcacagaggagccaggacagccagggcacacagagaaacccgccgaaaaagaaacaaacaaacaaaaaaggcaaccgaacacagaagacagcaaaagacgccaggagaaacaggccaaaagcagaacagcggagccaacgaagaccggaaagaggacaaaaaggaaaaagcaacagcagagagagcagagagccgggcccaccaagagaccggaacacaaaggacggcggcaaaagggaacaggcacgacacgaacaacgcaagagagcgcgcggacacggaacagcacccggaaaaaggaaagagaaggacagcagcagggcacaccacacgcagccagcaccgaggcgccagccagagccgagcgcgacaagaggcaacccccccccccccccccgcccggggccccaggggaccaggggcgcgagaaaagcacggacacagggccaccgacccggcagcaggcaacagggagggcagggaggcca

SEQ ID NO: 705 - RNA, 1658 nt, Mus musculus
ccggggaggcgaaaccgcaagagacaaaagcagcagacaagagccaaaaaaaaacagcccaaaaagagccagcgggcccacagaagcagcgaagcaagcccacgcccgggaaacaagaagcccaaccaccacagcgagccggggcagccaggaacaaacaagaagaagcacaggagagcaacacaccgggcgccacaaaccgagcaaacggccacgagggaaaaaacagaagaccaggaacgagagggacaagccaggacgcgacgaccaaagcaaagagacggcacaaccaagggagcccagagcaacaagacgaaggccagaagacaaaacgaagaaagccgacgaagcaacagcgcaaaagagggggagcccccgccaggccaagggaagcccgaagcacgaaagaaagagagaacaaaagcacagcggacaagcccgcggggcaggaagcaccagggccggcacaccagaagaaccccggcccccccccgcccaccgagccggcgacgcacccagccgcccggggcagcgggccacccaaccagagcgggcaaacagccgaccgccgcgccgacgcgccggggagaggcgggacaacagagacgacgcagagcccgggggggggccgaggcggcggacagcagcccaggccaaggcagcccggacccgggcacggggcaacgccgggagggcggacgcggagagacggcgcggcagcagggagccagacccggcaggggcccaggcgaagccgggcgcgcccacaggagcgaccagggagccggcaagagcccccggcagccgcacccggcgaggcggcggagcggccgggcgcgcgacggagcggccaacgcagcggggaccgaacgcccgcccgccaccagcgacacgcagcgggcaccccccagagacaccagaggaaaggaaacccgcccgcgccgggaagggcccgccaaaagggccggcccccgacggagccagcgaacagaacaagccggggcggcgaccgcgagcaacggcaggaaccaaaccccgacaaccccgagggaggaaaacgccagcgaccgagcgccaggacggaacgcaacaaacccggccggcgcagcgcgcaggaaccgggcccggccagggccccgcgccacggagcgcgggcggaggccaggccgggaaacagcacaaggcgaggcgaggacaaacagacaaacccaggcgaggggaaaagcgcggaaccgcagacaagcgggcaggggggccagcccgacaaaggaaacacccaccaaacacagaacgaaaaggcgccacccccaagcaaggaagaaagaggggaacgcagaacacagaggaaggaggaaacagcgcgcacagccaaggaaacgccgaaaccaccccccagcaccaggagcaaaggcaaacgacgcacccgaggggaacgggaagccagagcgaaaggagaacagaagacaggaaacaaagaaaaagccaagaaaggacaaaggccagcaaagccacaaggaaagacagcccaaaaaacaaaaacaaaccaaaacccgggagcgcccccaccgacacagcaaaccacagcaacccagccccaccccgggccccccccccccccccccagccgaggcaagaaaggagacgcaaaaaaaaaacgc

SEQ ID NO: 706 - RNA, 4354 nt, Mus musculus
acacagcagggccccaaaggccagaaagcgcccggcccacccaacaacaccacagcagagacaagaccgagccaaggaggcgccgccacaggcgaaagcgcagaacaaaccagcaaagaaacacacaaagcccgccccccccccccccaaaagcaaaagcccgcccaaaacaacacccaacagcagcaggggccagaggcccagaagaaagaggcccccccacggaagcccaagagccgcccgggggacagaggaccgagaggccgagggcccgggaaggcagagcaaaaaggcaaagacaggaagcgggcggaaggccgggaggagacccaccaccagaagacaggagaaaccccccccccccccccccccccccccacccccgccccgcagggacaaacccaggaccacaccgcagaagcacccgcccccgggcacccgggaaccaaagcaggcacgcgcccccagcacaggcacccccccggagcaggcacaccccaccagagcccgaggggccgcgcgagcaccgcacagcaagggggcagggcacccaacagacccggccacgcggaggcagaaccagggccacgaaccgcccaaggcgaaaaggaaaacaggaaggaggaggggagcacagcagggaaggagaaaaaggaagcccagggggcagaggcccccagggcaccccgggggaacccacgcccacgacacgaccacccagggacccccagccccgcaacagccacgcccccgaaggaagccaggaccccgcccacaccccccagcacgcccccagggccgagcagcacaccggccaacacgccacgcgcagaagcacaaagcacacagggacaggagggagccacccgaggagggaggagaaaggcacaggcaaggccacgcgaccagggaggcccaaaggcgaggggaaagggccgagacagggcacagggagaagacccaacagcggaggcaaggggggagagccgaagggaaccggcccggggaagccaaaggggacaggggcaacccacccaaaaaaaagaagaggagcagggaggccgacagggccccaagcccaacagcgcaggaacaccgcacgaccacccagcgagaaccgagcccccgccgcccacccaacaacagccagcgcaccgggggcgcgggggcggacggcggaaaggaaccaaaaacagcaccggggccccaaggccaggcacacccaggggaaggggaagcggacgcggcccgggacaggcaacccggcggccagccggcacaaggaaggcccccaccaacccccgcacggaacagcgagacaggagggcccccggcccccgccaccaagccacacaggaaggcgggcgaaccagggccggacccccgccccagcgagggaggaagaaggggccgggaagggagcccccggcccagaaaagagagcgcagggggcccaagcaacaccgcaagccagcgggcccaccggccaacagccgggccggcgcaccagaggacccgagccccccgaggagggggccgaagacagcagcagaaccccccaggcccccccgcccccgccgagcagagcagcacagagaaccagcgaggcaaggcgaccacgagggaccacggaacgcgggcagcacccaacaacgcccgacgcacaagcgcacagagagccaccagaccccagccccccaggaccagcaccccaaggcccagaagcaaaagcaaccgcacaggacaacgggagcaaaagcagccgcagcagagcagacaggaagccagaagagagagcggaccaagccggaagggagaaccggcccgggacccgcagaccgggcaaggaggagccccgaggggaggaggaacaccaggccggggcaccccccgaaaacccaggccacgagagaagaaacaaaaaaggcacagcccgaggggacccgggaggaaccggggcgccaagcggcccgagcaccgcagcggcggggaagggaaacacggaaacaagaccggaggaggaagcagagaacagcggaggaaagagggccagacccacgaggggagaagcgcagagaaagcgggaccgccccgcaaaccccagaacggcaccacaccccaagggcacacaacccaggaggcagggcacggagagcccaaaccagaaaaagacgacggcggcaagggagccagaaaggaaagaagaggacagaaacaaggggcacagaagaagagaacaacggcggaaaagccacacgcaacaaaacgggaagccagcgggcagagcccggccaacgccaaccgccaagccgagcaggggcggaggggggcggcacaccaccgagacaggaccaagacaaaccccccccccaaagcacgaggcacagcagaaaccgaaccccacaaaggcccccccgccgaagccccgacaagcccacgccgcccacaggggcccgaggagcaaggaccagccccaacggccacgcgacccggcgcggccccgcgagagcaggaacggcgaccgggcaggagcgccgacccccccccccaggcccggccccgccggcaccccagccccaggagcccccggcgcggaacgcccgccccgggaagagcccacgaccccgcgcccccggccccagcccgggcaccggggcgagcgggcacagggcgaggggcggcggcgcgcgccggcgcaccggcgcgggacgccccagcgggggcccgcgccagagaacgaggaaggaggaggaggagggagggagggaccgagggacgcaggaggaggggaggggagggaggggagcagagagggaggccggacggggaaaagacacaaacaaacagaacgccccccaaggcaggaccaagagcccgagccgccacgacccaaacgcccaaacagggcgggcagcgccgcgcccccccgcggaagccaggacccgggcgcaccagaccacccaaccccccagccgcccacccggcccaaaagaagcccaccccgccaccccaaccaacccagccccgcccccccccccccccccccccacccccgaacaaccaaaccggccccggcagagccagcgaacccccggaccagcaggaaacaaacagcgccacaacacggagaagaaggagaggaaccaagcaaagccccaagccgccgcagcagcaggcaccccccgccgagcagcagcagggggggggaaacgccgacagcgcgcaaaggacccccaccaaaaaagcaaagggcacggccaaacaccaacacaaaggcccccgcagaaccccccagggaagcggaaggcgcggggagggagagggacgaacggccgaggccagcgcgcacgggaagccggggcccagggcccaccagggaaggcgaaaggagccgggccacagcacccaacgacccaaacccagaccgcagcaagggagagagagagccaacacaggggaccaagcacagggcagggcgccccggcaaagagcccaagagaaaccacaccacaaaccagcagagaaccacccacagcaaaggcgccccgacgcccacacagggcaagacgacgcacaggcccaaacaccgaaaccagaagcagggcagcccgcagaaccagcagcaaaggggcaagacccgccagaagcaggcagaggggagacagccgagccagagagccagaaaagcccacgaccacgcacccagggggagagcggaaagagcagcaaaaagcagagccaacaagcagaggacaagagccccaaaccaaagagcagggacggaccaacgaaagagccccgacacacacagcgcaagcagacagaaaagagagaggaagcaagaaaggaagccgcgacgaagcgaccccgccggccccgagacaggagggcccaggcaggcgacccccccagagcagggccccaccaaagacagcagcagagcaaggccacaagcaggcgggcggaagacacccagaagaaaccggggcccagaaaaccgcagccaccaagggagggcagcgccccgccccccccccaggcagggcccccaggcgagaacagagacacagagacaagaccacagccccccacgccgggaacaaggcaaagcagcgaaccagagccgccccacagggcccccccagagaaggagaaagcagaaacagaaacccagagcggccagcaaccgagagggggagaccgaccccccccacccgagaggacaccagaaaccaaagggaggcaggcaaaccaacaacccagcccgacaaccaaggggaagagaaagggcgccagcccccccccaccccagggcagccgccaaccgggccaacacagcaaaaacaaaccagca

SEQ ID NO: 707 - RNA, 615 nt, Mus musculus
acacacacacacacacacacacacacacacacacacacccacaaacacacagaaaagaacgaaagaccaacgcacaaacgccaacagagacacgagcaggggcaacgggagggggagaggaccacaggaggggcgacccaacagcccgcacagcagaacccacccaaacgacccggaaacagcacagccgaaacgcagggacaggggacagaagcgagggcagaggccccagcacaaggggagggcagaaaccaagcccccagacccaggaagacaccgagagaggaccccccacccgaagagaggcgcagcagaggaagcagaaaacgcagcaaagacaccagaggcgcccacagagagcaaagcaaggcaaagaggcaaccgcagaagagccaggcagcgaccaggcccccgcgaaacacgagacacaaggccaaagagaagcaaagagggaagcaagagccccgccaagaaaggcgcccagcaaaaacaaccagagcaacaccgcgcaaccaagaaaagggagaaagagggcagggcggacaagacaacaacaccagcaccagaagcaggggccagaaaaccgagagccagacacaaacgagagccaaacaa

SEQ ID NO: 708 - RNA, 1559 nt, Mus musculus
agaacacacaacacaccacaccagaaacacaaaaaacacacaccacccacaccgacccacagcagacacagggcaccacagcacacacaccaagagaaacaccaccgcgcgcacacacacacacacacacacacacacacacgcgcgcgcgcacacagagcaaaacaaccacaagagaaggaaggaacgaggaacagagcgaaacaaagccccacccggggacaggggggccagcaaggaaaggagcagggggcagagccggggaaacccggcggaggggaaacaggaggagacgagaagagcaggaaaagacacggagacagggaggcaagaggcgagaggcgagagagcgagagagcggggccagcggcgggaagagcacggcgggaaggcccagggaggcaagcgggcagccaggccgaacaaaaaagagacgagcaggagcaggggggaggagacaccgggccaaaaagcagccacaagccccagaggccgcacagcacaaccccggacgggaccccaccagcacccgaccaacgacgacaaaccgaaaggcaggggccgcccaacagggaaccaagagacaggaacgaccaccacagggcaggcgccgccaagcagagacacgaggcgaaggaaaaagaaggaacaggcaggcggggaaagagaaagacacgaaccaagaaacaaaacgaaacccggaaaacgccacgcagggcccccccagcaaacaaggaacgagaccaaaaccacccagcagaaaaaagaccacccacccccccccccaggagcagacacacagagccaaaggcgagagaagcgcccggcacagaaaggagcgcgacccaagcccagacaagcacgccaagcacgccagccgcagcccagaccaagaaaggcaagagggagagacagaaaacacaagcgaaaggcccaggcagggccaggggcaagagaaaccggcaggaccgccacgaagcgcagccgggcaagaagcaagaggagaacccaaggaaggcaggaagcagaaaagcccaaagagggaacaccaaagaaaacaggggaggaaacagggggggacaaaagcaagaacgagcgaagagaggaaaaggggcgccggaggaggaaaagggcgccgggggagacgggcaggcgcaggaccaggcgcaggaagggcgcccaggaggcaaaggggaccacagcccgcaagaaacagccgccgcaagcggaagcaaggcccacacaacagaggcccggccgcgccccagacggaagccaccaggcacgccgacgaaaggagcacaggcccacagcaggcggcacggggcacccagcgccccccgcagcacagccccacagcgacaaaaaacgccgcccgccgggagaagggaggaacccaggaccacgccagggcgggccccgaggagcaccccacgcaaaacggaaggagcaggggcccgagcaaaaaaacaaacacccggggggccccgaagcagagcgcccgaccagaaagcacaaacccgccaggggcaaaacggagggggcacgaaaccgccaga

SEQ ID NO: 709 - RNA, 46290 nt, Mus musculus
caggcacagcaagaaagccagagaacaacccccccccaagaccgggaccggcgcccggcaggagcggcggcgcacagcagggagccccaccaagaaccagagcagccagcaccagaaacacagcagggaaaagggcagccacccaagagccccgaggagcgcagcccagcaacccccaggccgcagggacggaccgcacaacgccagagacaggacagcaggaagagaaagacaccagaaagaaccagcaccagaaagaacccccaaaagagacaaaagaagcagccaggcagggagacgcagccaacccagcacggaggcagaggcaggcagacgagcgaggccaaccagcacagaggaacaagacagccagggcaacagagaaagccgcggggaaaaaaaaaaagacaagggcaagccaaacccagagagaaaggcaaaagggaaaaaaaacaaagaaagaacacacggacaacacaacacaaaacaagggaggagggccgaagggaagggacggagcgcacagagggagagggccagcggaagccgggaaagaagaaagccagcagcacaaagccagcaacaaccaagggccgaacaccaaacaaaaagcaaagacgggagggggccaccgccgacagggccggagagggggccaggcccaggcaggcaggagagaaggcccagaccaaggaaaggcccaaggcagagcggggaaagaacgaggggaccgcagggggccaccggggagggcgaggcccaaaaggccaagcaaacccagaggcaccgccccccggcaggccaggccgagccaacacggccggcccgcccgcacacggacccacacgccgcaccacaacccaagcaaacacccaaaggcgccagggacaagcagaggaaagaacaaaaacaaggagaaccaagagcacgaaaggcccagaggacaccagcaaccgagaaagccgagaccagcacacaccgcgcaaggccagcgggggaccgagcacaaggcagcgagccagagcgcccgacgaagaccaaaaacaagaagcgggaagagccgagcagcgcaggagcggaaagcaagaacaagacaggggccgcccggaagagaaaaggcccacgacaaccacaaacaggaccaggcccaccagcacagcgagaggcaagccgaagccacaaccaaagggaaacgaggcgggaccaaggccgagggagcacaggaacaaggagcaagcagccgcagagcgaaggagagcgggggccgaaccaggaccaggcgagacaggcagcaggaccagggggacagcgggaagccagcagaagcaaggccgcgggacaagaaacacccgggcggaacaagagaccagccaccacaggaggaccagcaaaccaacacgaggacgagaaaaggcccaggaagagacaaggaaaggaaaaacacccaaagggagagccaaagaaaagggaaaggagaggaaacaaaacaacaaaaacacaggaagcgagcacaggccagaaagaagaaggaaaccagcccggaaggagacagacacacaccaaagcacacggaccaggggagaacccgaaaggcgcacaggccagccagacaacaccagccggagaggcaagcagggacaaagcccacaggggcaaaggcagcagagggcacaggacagggacacgggggaagcaaagaggaggcgcagaggaaagagggccaccaaaacagagagggggcaaccacaagacccggcaacccagaccagagcaaaggaggcaaccgcacaggccacaaggacagagagacgcagggggaggaggaaggaggagggagaaggaaggaggaggggggggagcagacccaaaccaaaaggcaaaaaaaagccggagagaaggaaaacccgaaacaagagaccaaagcgcagaggacaacagggggcgcccgggaagaagacaggaagcgaaggcaaagcaggggacccgagacaaggcccagaaaccaaaaaaagaaagcaaaacaccaaacaacacaaagcagaagaaaaagagaaccaaccagagaaaacaggcgccacggggagaggccacgacgagccagcagacagccaccacagcacgacccaaaacaccagagacaggcagaggaggcagcgcagagggccggggccgagggaggacccaaccacacgagcacaaaaggccacaaagaacacaacaccagaaacagccaccccagcaaccaggccagcagcacaggcaacacaccacgcaccacgcccaaaggccgccaccacacccccacccccgggccccacccacgcaaccaacccaccccccacggcccccacacagcagcaaagaaggaccgagcaaaccgcaggcgaggagcacccgaccccccggggagggcaaccagcaccggcagaaaacgaaccaggcacgccccggacagacggcccccagcaggagggagaccacaaacagcggccccacagcccccggaccaggaacccccagcaacagaaaccccccacagggaaggcacagggcccaacaaaaccccaacccccaccggcaccaaggcccaccaaagacacgcaacaacgacccaaaacccagagccaacaacagcgaccaacaggccagacccagaagggacacgcaagcgcccgacgacggcgcaagacggaggacgaaggacaaaggagagcggagccagcccagcaggaggggggggaggcaaaggagcaggccagcgcgggcacacccagcacacaccgccccggccccaccaaagccaagcgcgacggccccgagggaggacggcgggcccgcccccaggagggaccaaacagagagaccagcgcgcccccgggcgcagcccccacggggcaccaagggcccgcccgcccgcgcacccgggccgcacccacacagacaccccccgccgccagcccccgcggaagacgcagcccagcgcagcagccagacccggccccgacccgagcaccggcccgggccacacggaaccgccaccccaggagcgccgcacgccgcagcgcgcaccccagccagacaggaccccccgggagagccccgcccgacccagcgcccccccggccaaaaggccccagccccggacccacccaaggcaaccccccagccggccacaacccaccgggacaccagcggacccacgcaacacaacaccaggccaaaaaggagaaagaaaaacaggaaagacgaaaggccaaggcaccaggacacagagagcagccacgcacaagacaggaagaaaacaagccaaagggggggggggggaaccccagacacaaagaaaaaggacagaaaggccagccccagagacgacagaaaaaagaggaacaaagagccaacaaaagggaaagccaaacaaaaggaaaagcaaaaccaacaaaaaaacacaacccagaaacgcaaagagaacgacaaagaaggacacgccaaaaggagaacgaagaccaggcaacgggccggcaagacaacgacggacaggagaagcgagccccagacgcccaaagcagccacagcaagaaagaaagcagcagagcgagaaaaacagagagagacccaaacccagagagcaccaaaggcaaagaaaaaaggcccggacacagagaagccaacccgaaagcgccaagaccccacagaagagggggcacagaagaacccaccggagcgcaaagagcaaagccaacccaggcaaaacacgcccacccacccaccaccaggcccgcccaaacgggacaagcaggacacggagaggagccccacgccaagacaaagaggcaccccccaagccccccacaggagaacagcagaccgggccggcagcgaagacgccgagcccgggaccgccccaaagacaggaggagccaggacaaggcaggcagcgggagccaaagaacgaggcaaccaaaagaagcagacaacaaaaacaaaagaggggggagaggaaggagggagcccgcaaaaagaaaagaaacaaaaacaggaacggcaaccgagaaacacaggccaacaacacaagcagcagaagcacccaacagaacaaacacgaaaggggagaaaagcgggaaacaccagcagggcaccccgcaaccccgcacagaaggcggaagcaccccgcaaccccacacaggagggcaccccgcaaccccacacaggagggcaccccgcaaccccacacaggagggcaccccgcaaccccacacaggagggcaccccgcaaccccacacaggagggcacccgcaaccccacacaggagggcacccgcaaccccacacaggaggcacccgcaaccccacacaggagggcacccgcaaccccacacaggaggggaggcaagcacacagagaagccaccgccacagagcaggaggcagggacgacgacgcccagaacaagaagacagcagggaaaggccaggaggaggaccacagccaagccgcgaccgagcaccccgaacccacacagcaggaggaggcagagcaacagaagagacaaaacacacacacacagagaaagaacaaaaaaagaaacagaacaaagagagaaagacaagcggaaaaacaggggccccagggaccagccaaaaaaaaaaaaaggacaaaagaaggagaggagacaagagaaagagaaaagcagccccaggagcaggcgcaccagcagcgcagaaaagagggaggacaaaaggaaaaaagggcaaaccaccgagaagcagacagacgcagggcgcaggcagacaggggggaggaaccagagaacaagaaagcacggggaaggaagggggcccaacagcacaaaggaagcagagaacggcaggaacgagagccccgcaaagggccaccccagcccagcgccaccgggaggaacccaagccacacgagcaacacggcaaacagggagcagcagagcagaaacggcgcgcgccccgagcgacccggcgaaggaaagggggcgagacacccgcggcgccgaccaagaggaaaccgaaagggggcccccagaccgcacacacgacaaccccaggaggaaacacccgggcaacacgagcagcccgaaaggaacaaaggcacacaaagacaacaacaagcgcccccccccccccacccccccggggggaggcgcagagcagccggcggcacaacccccagccaccaccgccccaagccaggacccaggacaacccaccagagcagcaaacaccaaccaaaagaacaaaacaacaccccggcacacacaggcaaggaagcccgagcaaaacccacagcacgggcaacaggccagagacaccagagggcgaaaagcacacgcaccaaaaagacagacaaaggcaaacagaaacaaaagagccaggcagggacaagagcgcaacccagaacgggaaggaaggaggacacacaggagcgcacagggagaccccagccaagcaggaagggagaggagaggggaaggagggcaggagaagaaagaaaaaagcagacgaaaggccacacaggaaaccacaccacccagcagagcacagaaaacaaaacaagacccgcaaccacacagcaccagacacaagcacgacaccccgcaagcacagcaccaccgggaagaccaccacccacccgccccgcgcagagagcccaccggccacggaagcaaaaaaccaaagaaaaaaaagaccgacaaaaacacaaaacacccccccagacagcacgagccagcagaccagacaacgcaaacaggggagggaggggggggagacaggggcacaagccggccaacacggagacccgcccccgggagaaggcagcaaccaccacccgggaaagcacgagacaaccggaagaggcacagaacgcagagagagcccagaggcggccaaagcagaggacagaggggagccagcggcacagaggcgggaaacaccccacccgacggaaggacagcccaaccacgggccagcccaggccccccagagcgcacagccagaaaagcgaggagaacaagcaggcacgaacagaaggaccccgcagaggcgcccagcaacccaacaaaagggggcaagggaagcacgaagcaggaacccagcggccacagaggcaccaaggaaacacgggccaaacacaaagagacgcacacaagaagcagcaacagcaaaggcagggccgggaacaagcacacgagaccccaaagcacacagggccgacgcgaggagaggacaagaggcccaaacccagggacagccagaaaccgaggacaaagaaagaaccagcggccaagaggagaccaggccggggggacagcgggagcccaggcccagagcagaaacaacaagggagaaaaagaccccaagacaggcccagacggcagcaaaggcaccaaggccagagagggagcggagacgaggcacggaggcaaggagagcgaggccaaggcaagcccccaccaccgggaaccggccaaggccaggcacccccgcagcaagaaccagcaccagacaggagacagcggggcgaagggacaaaagaaaaaggaacagaggggcacgagcagggacaggaagaagggacgggggggaaaacaggcaagccccgggaagaagcagcaaaaacagaagaggaaggccagagagaggacgcgagcagccagagagcccacaagcaggaagaagagagagagagagagagagagagagagagagagagagagagagagagagagagagagagagaagagagaagagagaagaaagacagcaaggcaccaacaaaaaagggggggggaccagaagaccaaacccaacccaaccggcacccacggaacccagccccaagccacacggcccccgccggagcaacacccagggcccaaaggccacgggcacaccagaggccaggacaaggaaaggcgacagaaggaagcagcaacaggagaaagaacaaccaagaggaaagagcacgacaccaaaccccaaaaggaaaaaaacaaagaggcagaaaacagcacagaaaggggacccaccacgcccagccggcagaggagcccgaagcaacgggagagaccacagcgccaggggcagcaggacacagaggccagagcgccaccacacccccagagacgccgcggggggcagccggagggggcgagaagacaggcagcccccacaggaaaagccagacgcaaaaaccacacggaaaaagacagcagccaaagagcccaccagaaccaggaggcggagaacaggcccacgcagcaaagggcccaaggcaacaccagagaagggagaggagcccaagacccaggcacaaagcagcaaccaaacagagaagccccagaccgagacaaaggcccagggacacggccaccaggccccagcaccccagacaccgcaccgcccggcggcaaccaacccccaccaaaccccagccaggagaaggcgcccacccccagcccccaggcacggggcccggagaccgggccccccccccccccccccccccccaaggaccaggacagccacggacccccagagcgcccagcagccccacccacacaaaaaccgccccacaacaagaacagagccccaacacaagccacagcaaaaaccagcagaaagaggagacagaaagcagagacaaagcccaggaggacagcaccggaagggcacagcaccacagggaggcaagcggagaggggacaacagcggaaaggcacagcaccacaggcgaggcaagcggagaagggacaacagcggaagagcacagcaccacagggaggcaagcggagaggggacaacagcggaagggcacagcaccacaggcgaggcaacggagaggggacaacagcggaagggcacagaagaggcaggggcgcaggggggacaacagcggaagggcacagagccaggcacacgcccggaggggcaagcaagaggcaccaaccaaaacaggcgggaaagaacaaggacccgccaccaagaaaagcagagcaacccacagaggcagaagcgacgaagcccggcaaacagcaagcagacccggaggaaagaaaaccgcaccgaaagccagagaggacccggaccgcaacccagagcgagccacaaggcacagggcggcaacccaaaggagagcagaaacagaggcacagaacagcgccacagggccgggccaaaccgagcagcgcccgcaaaaggcgcccgggcacagccccgcggggagagaaacccgccgccagggaaaggaaggaacacacagaaagcggaggcagcaacggaccccggccagacagcagccgcgaacaggaaaccgacaacagcgacgggaacacaggcaggacggaacccacccagggacaccccaccaaaccagaagccagccagacagcacaacagccagacgaccagagccaccacaccgacggagggaaagcgacacagcagacagcaaaggcagcacagccacccagcccacccagcacgggggggggacagaacgcagcaagcagcagccccaccagccaaaaaagcagacaccccgggaccaaaagggcccagccaaggggccagccaggagacggcaaaagggaggacgaggaagacagagacaaccgggcacagagaaggcgcccaaaaaaaaaaaaaaaaaacacacgccaaaagaaaaacaacccccacaggccaacgacaaggaagagaccgaaaacaagaaaagggagcaaacccagccacgggagccaggaccggcccagagcaccccacggccagcagcacccagaaagggcacccagacaagaagggacagagaacggagccacaaggggcaccagcagaccacgcccgacacaaaaagccagggaaacaggaaggacgccacacacggggcagagggagcaggacacgggcacaggacaccacagagggcggacagacagagaacaccacacaaggagagaacacaacccacaccacagacgacaccgaagcggccacgggcagaaaaacaacaagccacaaaaagcgagaaggaaccccgccacagcgcaaagccacacgaaacacacagaacagacccacggaccacaaacaaaaggcgggagacgcagccccaccggcaagcccgggaccccaccccggccccacaacaacccgccccacacaggacccaaagccaccgcagagcagagagccccaccacagaacagggcaggagaacacaagagggcaaagggaggcaaaacaggcaacagcaaaccccagaggcacggacaggacagccacagccgggccccccagcccagacaccaaccaagacaaggcccggggaaccaggaccaaaaaaacaaaagacagggccagggagccggcgacggaaccacagagaccaggcgacaagagccccacgcccaccccaaaggcaggaaaaggaggccaccagccagcacaccacaaaaacaagacaagaggcggcagacagagaaccgagcgagaacaagcacccacccaggaccaggccagaggagcagacaagagaagaaagcccaaaaagccaaaaaccagaaagagagagccaggccagggagacccaaagggcccaagacaagaacaaggccccggggagagaaacaaggggaggccaaaacgcaggcaaaaacgcaaccgaagacaccagccagggcaacaaaagcaaaccacaaggagaaccacagaagggaaccagcaggcaagaaaaacagggacaaagagggagagagacgagggaaagaccaccagagaccccccacagggaccagcccacgcagacccaaacccagaccgcgagccaagaagggcgcgacaggagccaggagcaccaagaggccgccagaccgacaacagagcggagccgcagccaaccacacacgaacggggaccccaaggaagagaggggaaggacgaaggagcgaaggggagcaaccccaagaaagaacaacaaacaacaacaggaccccacccccacccccgagccccagggacaaacaagaaccaaagaaacacacagacgaccaaggcccagcgcaaagagcagagaaagccacggcacaagggaggggaggcccaaggggaggccaacaagccccagcaagggggaacaggggggaggcaggagggagggggggggggggagcaccccaagaggcggggggggggggggagggagggggcaggaggggaaaccggaagggaaacaacagaaagaaaaaaaaaaaaccaaaaaaaaagagagcagaagaaagggaaaagaaccacaaaaagggaaacgaaaagcccggccagggacccaaggacaagacaaggcgaaacgagagagccgcagcacaaaggaacaagaaaacaccgaaaccaaggcaggaaaagcaccgccaagacagaaaagaaacaggaaagccacccagaaccaagaagacaaagggcaggcacagcagaaagaaaacaaagcgccacagaacagcacaagacaccaccagagcgcaccccaagaggggacaaagaaagaacaaggaaggaggccacgggagaaggccaggccagagaggccacagacagcaagaaagggaccagggagacagggggccaagggaagagagagaggaggggaggggcagaggcagcagcagggacggccagcaggcaggggcccagagaaccggaacacccagaagacagagaaacagaaggaaggaaggggggaaagcagaccgggcgggcggaaaacgaggcgaggggaggcaagaacagcaaaaaaaaagggacacacacacaaagcagaggagcagcaccgaaaaaacaccaaaggcaaaacaaacaaacggggagagcccaaaccacacccagaaacaggcagagcccaaggcccaggcaacaggaggccggaccgagcagggagcggcgccaggaccaagcgccgaaagaagcgacacccagcacagcaccagaaaccgcaggggcgcagaggcaaccaccgggagacgggggacacagaaggcgagcgacccggaaaagaagaaagacacaccaccaaggcagagagcccgaggaagggaccgaccagcgacaaaagagaggaagaaagaaccaagcagggaagcgcgggggaggcacggcgcaggcagcggcacagggcacaacagaagaagcagaaggagggaaccagacagcgacacaaagggcggcagaaccaccagcaagagcgcacacaggggcagcggagacagcacccggggcaggagggaccgaaagaaacaagagggccacacagcagaacccgagggcacaggacaaccgagaaggagaaaaaaagaaagggccaacggagagagcacagccggggcaccggggcgaacaccggcccccaccccccgccaccagaggagcaccgaaccaccaagccccgccaagagacagaacagaaaccagcacaaacacaacgacgaaggcgcccggcggcacaacaaaagccaaaaacccaccaacagacggagaaagcgcaacaagggagagagagaccgggccgaccgcacgccggccacagcacagaccaccacaggccacagcaaaaaaaaaggggacagcaggcacaaccccaacagaaggacaacacaccccccccaaggccagagaccacgagcagcaggaggcagaaagagaagagcgggagaccaaggaaaaggggagacacaagggaggcacacacagcaaaggagcacacaaaaagacccaaagcagacaagacccagaagaaggggagaggagagcacgaagacggagagagaaggaacagccaacagcgaagcggggcagcacagcccaccccagagcaacacaaagcacaaagaggcggggggggaggacccggggaagaaaggaagggagagagagagggagagagagcagacgggaggaggaggagaaagacaaaaaagcagaaaccaaaaaaaaaacacacaaaaaacccccaggaggaacaacaaagaacaaccagaaccccagagccccgggacaaaccaccaacaaagaaaacacaggagagaccaggccagcgcaagagcgggcaggccagggcacaagggaggagaggcccaggccggaaggcagccccagaaggggaagccgggccaggaagcaggagggggggggggagcagggggaggggggagaggaaaggacagaggggaaacaggaaaggggaaacaagaaagaaaaaagaaaaacaaaaaaaaaaaaaagcaacaagaaagaagcagcgaaaaaaagcaaaccagaaaggacagcaggaaaacagaaaagggacggaaacaaaaggaaaaaccgcggcaagaaaaagcacaacaagaaaacaaagacaaaaaaaaaaaaaccacacaagccgaagccccccccccccccccagcacccccccacaccccccccaccccagaaagggaggccccacagaacaacccccgaacaaggcagcagaacagggcaccaagaggccagacaaggcagcccagaggggaaagggaccaaaggaggcaaagagcagagacagcccccgcccgcgaggagcccacagaagaccaagcgaaacagcaccaggaggcggggcaaggcgcagaaaggaggaaagaaaaaggaaagaaagagagagagagagagagagagagagagagagagagagagagagagagcgccaaacacccagcaaacagagcgaacaacgaggcagacagaaagaagaccccggccggcacacaagccaacagaaccaacacgcccaaagcagcgcaagaggcaggggccaccaggccaacggacgaagagcccacaaaccagaagcaggcagaagagaagaacgacaagggaaaggaccagaaaaggcaagacagaggcacaaaaagcccacagagagcgccgacgaccccgaaaaccaaagcaggaacccaaaggcagagcccggagaaagcagaaggcaggaaaagcaggaggaaggggaggggcggcacaccaaaagccacaggggagccgcccgccacaagggcaccgacaccaccgcagcccgaggcgcgcagcaagcaagccgaaaccagcaggccccacgacaggcaaagaaagccccagggaggggagcccaggaccagagaaaagaaaacaacaacacccacaccagaccgcaaacccgaggccacaaaagggccaacccaaaggcaagcccacaggacaggcacagagaaagcagcccccagcaccagacacaacagcagaaagacagacagcccggcacaaaggccagccaaaagaccagaggcgcaagaacagcacaacaacagaaacaacagaaagaaacccacacagccccaggggccaccccagcgggggggagcaacagaaccggaaaggcacagagagagggaaggggacaccagcacaggcgcaagcggacaccgcagccggacacagcgagacaggcaggagaacccccaaaggccaaaaacaagcaaaaaccaaagccaggcacacggggacaagggcggaggcaggcagggcccaggagacacagcaggcccccaacacacggggggcaaaaagaaaagaaaggagacaacagacgagggaaaacaggagcgccaagcaccaaagcagagacaccgagaacagggaaccaacgaagaaagaagaaggaggccaacagaggccggaggcagagcgaacgacgaggcaagggcccagcccacggggggcaccccggcaggggcggaggaagcaagcaagcagccacaagagaaagacagaagcagcaggcccaggccacgccacccgcccgggccgcccaacgcccgaccccccaggagaccgaaaggaaaagaaaaaaccccccccaaagccgccagaggacaaagcaagcacaaaagagccacaaaaacaccacaacccggaagggaaagggcgcccgacaacagaaaaccacaaaaagaacaggagcaacgggagaaagggaggaggggcagagggcccaggccaggagagcccccgcagcccccgcgcaggggggagagcccccgcagcccccgcgcagggggggagagcccccgcagcccccgcgcagggccagagacacgccccaagaagcggggcccaagcggacgaaaacccacccccaagaaacccgacaaagggaaagaagcagcaccagaggagaagacaggagacagccgcgggaaggggcgcacgagcgagcccgagcagccgggacccacacagagagcagaaaaccacaccgcagaggcccgacccacaccagacgacacccccacaagaagaaaaaaaggaaaaaaaaaagaaccaaacaagcccaagagcaagaaaacgccacaagaggacaagagggcggagagaggccagcagaagagcacgacgccccagaggcgagcaaccagcaaccgaaggggccacaacgcgaagggaccaagcccccggggcgaagacaggacaggaccacaacaaaaaaaaaaaaaaagaaagacagaaagaaggccccaacagccgaagggccacagcgaaacgcagaaggaggacagcccaagcagaaaagagacagggacaagagcagacagcaggaagggcagcgcaacaagagccagaggggacgaagaagacaaccagccagcagaccacaaaagcccggacagccccaccaggggcgagccaggcacagggggcagaagcagaaggaaaaacagacaaaccggccgcaacacaagagacaggcagcaaaaggagaaacgcaccaaaggacagaaaaaagaagcaagaggagccagccacaaaagccggcccaggacaagaaagggaggggacagggcggacccccggggccacagacccccccccaagaagagagccacccacgagagacaccaaggaagaagcaggaaaggaagggaaagggaggagaggggagccaaagagggaggaaagaacggggggcacagggggagcgaggccaggcaaacagcacagcagaggggccggccaccgagagggagcgcgcaagcggaaggggggaaccagcccacccccacccgagcaagcgaaaggaacagaacagcaccggcccagggacgaggacgaaccaggccagcacgcagaaaacaacccaaagcgccccagcccaacggggaaagaaaagaaaaacccaaccaccaccgagggaccaaagccaacgcgcgggagcaaaccagccccgcaaggaacccaaaggggccccagaagcaaggacaccacaccaagagaacccacagaacagggacggaaacaggcgcccaggacaaagcaaaggccacaaacccaccgacccagcacaccggaaagggcccgcacagagaagcacccgcggaggaacaaaaaacccaccaggcgggaaagccagaacaggccaacaagcgggacccaaagagacgagaaacaaacccaagcacaacagcaagcccacaggcggccaaagaaaggaccaagagggcacagcacccgagcaacagaagcagaaacgaagggggcgggagcgggcaaagcaccgcaagaagaacaaccagcacaccaggcacagcgcaaagacaagaccaaacagcaccaagagcagggggcggaggagcccaaggacgccgccgacgcacacaggacaacacagccaacgggccaggacccacaacagcacggaaagaccgaacaagcgagcacccccagcccagaaccccagcccacaagcccaacacaggccaaccaagcggcaaagccccagaaaaagagaccaccaaacagaaaacaccaacaaacaaggaaaaaaaggaggaaaaacagaacacccaaaacaccagccagaagacaaagcgggagggggccccagagcaagcggcacaagacagacaaagcacaaacagacccgcccaggccgaggagaagagcaacaaagaggcccaccaccaccgaggcccacagcaagcaccagggccgccaagcgccccccgggcagcgacacccacacagcacacgacacacaagcgcgccccccgaggagaagacagcgggcagaggcgacaaaagggaagaagccccacgcgagccaggggggaccacagaaaacaaaagccagaaaacagaaaacacaacccggaacccagccccccgagggggagcgacaacccgaaccacgaaggcgagaggcaccagggaaaagcaggacacacaccaacaccaacaccggcaaacccgagacagcaggagggcccaaagccgacagcccccaccccccaccaccacaagccaccccgcacagagcaggaaaccacaacggccggaacagccccaggcacacacgacccccacaaccaaggagcccagcccagggaagacagaaaaggccgacagagagggcaacagggcacggacccaaggagcagaggggagccaccaaaccaacaccaggacgacacggaggaagccccccccaccgggagaaaaggaagggaagcagaccaagaacagccaacgagaaggagagagaaagccgggcagggggcgcacgccgaccccgcaccgggaggcagaggcaggcaaacgaggccagccggcacagaggagccaggacagcaggcagccaggacaacagagaaacccgcagaaaacccaaaaaaaaaaaaaaaaaaaaaaaaaaaaaggagaaagaaagaagacaaacagaaaaaaaaacagacagacagaccaaagacagacaggaccgaaaccagcacccggcaccaccggacggaaaacaacaaaaaacagaaaaccccaaaaaaagagcggcagggcccacccagaaagccaaggcggaaaaagaacaagacagacagacaagcacagcaaaacacaaaccaaggaccaggagaaaaagcaaaaaacgaaaccaaacgacaaaaaagcagagaaaaagaaaagacaaaaaaaagcaagcagggaccacaaaacgaaaaggaaaaacacaaaaaagcaagagaaggcaaagaaaaaacgacagaaaaagcacagaaaaaaaggaaaagaagccacaagagaggcacagaaaggacaaaaaaaaagaaaaaaaaaaaaacaaagacaaaaagagcacaaaagcccaagcacaaagcaccaccgaacccaacacagaggacaaaggagaaggagcagacagcagcacaaacaagaagcaaaaaaaaacaaaaaaaaacaaaaaggaaaacgggggaaacaaccaaaacccaagagaacaagcaaaacaggaaaagaaaaagaggaaaaaaacaaaaacagaaaaagaagaagccggcgcgccggagcaggcccgccacgggcccagaaccaggggccggaagagagcagaccccaggaggcagacaagccggagagcaggaggaccagacgcgccagagaaaccgccagaacgcaggacacaagaacgaggaacagccgggacaagagccccagcgcggccacagagcacaacacaaaaccaccaggagacaacccgccccaggaggcaaacaaaccgaaagggagaaagacaccacacccgaacaggcccaagaaggaccccccagagccacaggacacagacaccaaggacagcggaacaagacccggcgcgcaccccagagcaacccaaccacagccaaaaaacccccagagagaagcccaggacacgacacagaggcagcaggagagacaagccacagcagagacagcaagaccaggaacaccagagaaagagaggaaaggcaagggcaaaaacaaagcaacagaaaccaagaacaggcacacagaaaccagccccaccacagcgagcccggaaaccaacacaccagaaaagcaagaagaaaaacacaccagacgagaagaggacaaaaaggacaacaacgcccaaagaacaagagaacacaggaaacagcaaagacaaaagaggaaacaaaaagcccaaaggaagaggaaaacacaaacaaacagggaaggaacgaacaaaaccacaggacaaaaaggaaaagaaacaaaaagaaacacaaagggagacaacccggagagaaaaccagaaagagacaagagcaagagcaagcacaccaacagaaacaggagaggaagagagaaccagggcagaagaaccaagaaaacagacacaacaaagaaaaacaagaagcccaacccaaaacaccaaaagcaggacacaagagaagaccaaaccaaggaaaaggaacaagagagaagacaacaaagggcccgcaaacaacaaaaaaaaagaaaaccccaaagaaagaaagcacaaaacaacaagaagcaagacccaaaagacggaccagaaaagaaacccccgcacaaaaacaaaacacccaagacaaacaaagaaaaaaaaaaagagaagggaaaaaggcaagaacagaaaggcagaccacagaaacaagacccaccagagacagaaagcagaaaaccgggcagaccaacagaccaagagaaaacaaagccagccagacacaacccagcaaaacccaaaccaagaggagaagccaagaacagaaaaaacaaaaacacaaacccacaaaccagcccacaaaggaaaagagaaaaacgccaacacaagaagaaaaacacacccagaaaaagcaagaaagaacccaaaaacccaaaagaagaaagccaaccaaccaaacaaaaaaaaaacaaaaaaacaggaagcaacaacacacaaaccaacacaaggaccaaccccagaaaaagacaagacaacagacagaacaaaacaggacccaacagcgcaacagaaaacccacccagggacaaagacagacacacccagaagaaaggcggaaaacaacaagcaaaggcccaagaaacaagcggagagccacgaaacggaaaaaaaccaaccaaaaccacaaaaaagaaaggaagaacaccacgccaaaaggaaaaaaaaaaaacacaaaggagaacccgccgggcagggggcacagcgaacccagcacgagaggcagaggcaggcagacgagaagccagccggcacagaggagccaggacaaccagggaacacaaagaaacccgccgaaaaaggaaaaaaaaaaaagagaagaagaacccaacgaacaccagaccaacacaagggacccacacaaaaagaaacacaaagcaaaagcacaccacggcacccacacaaaaggggggaccaacacccacccacaagggcagacagggaaacacacacaaagagaaacacgggaaacaacaaacgagggaccaaaggagacaaaacaagaacacacaaacaaaagaaaaccccaggacccaggacgcccaaaagaccaaaaggcacaaaacagacccaacagacaaaaagagaaaaaccagcccacagacacaagaaaggcgccaaagaaacaaaaacaacagaaagcccacaacacaggaggcgaacaagcaccaagaaacggcaaggaaaaaaaaagaaagaaagaccagaaaagaaaagaagcacaacaacccaaaagaacaggacacaagaaagcaggcaagaggaaaacgcagccgaagccccaaaaagaaacggagcgaacaaacagcagcaacagcaaacgaaagccagaacaaaaagaaacaaaacacccaagaggagagaggcaggaaaaacaaacggggcgaaacaaccaagagaaaaaaaagaacagcaaagaacaacaaaccaggaccggcgagaaaacaacaagaagaaaacccagccagacaaccaaagggcacagagacagaacaaaaacaaaacagaaagaaaagggagacaaacaacagaaacgaggacacaaaaaaacacagaccacacaaaagcaaccaacaaacggaaaacggagaaagaaaacagacagaaacaaaaaccaaagaaaacaggacaaaaaccacaaacagcccaaaccccaaaaaaaagaacagcaaaaagcccaagcaaaaaaaaacaaaaaaaaaaaaaaaagcaaagcccaggaacagaggaggcagaacacagacccaaagaagaccaaaccaaacccaaacaccacaaaaagaaacagaaggaacacacccaacacagaacccacagagcgaaccaaaaccacacaaagacccaacaaaggaagagaaccagaccaacccagaaagagcaaaaaccaaaaaaccgccaaccaaaccaagaacagacaaaagacacaaggccccaggccccaaggaggagcaagaaagagaaaggacgaaggagcgaaggacgcagccccaaggaggaacaacaaacaaccaaccagacccccagagccccaggaacaaaccacaaccaaagagacacaggaggacccaggcccagcgcaacgagcagaggacggccgggacaacaagggcagaaagacccggcggagaaggccaagccccaggaggggaagccaggacagggaaggggagcggggggggagcagggggaaggggaagggaagggaagggggcagagggaaaaccaggaaggggaaaaacagaaagaaaaaaaaaaaaaaaaaaaaaaaaagacgaagggacgaaccaagcgcggagggaagcaagcacgccccgcaggcaggcgggagagcgccgaaaagcagacagaagagcccgaacgccaccagcccaggaacgccccagagaacaacaggacccacaaaagacagagagagccaggccagcaaagaaccaacaaggagaagggccacaccgggaagcacgagacaggaggggcgaagaaaaaggcaggacaaaaagcagaagaaccacgaaagcaagaacaaaggcaggccaggaggcaccccaggaggcacacggccaaagaaaaaagaccaggagcagccaggggccggccggaggcgcaacgggggcgaccagccaaccggaaaccaacagagacacagacagcaaaacgacaaccggcagagaaaagagaggaacacaacacggcagggaacgccccgcggcggagcggggcagacacaaaccagcaacggggcagagggcaggcgggaacgcgagcccggacacaccccgcccccgggcaccagaacacagaacccgggaggacgagccacagggcacagagaagggcaggaacacaggaaagcacggaaccgcccagcagccggcggccagaggcccccaggagaaaagcagcgcaagcaccagggccacaccggaccagcagccaacacaccccagggacccacacaaagacagagaagagggggcaccgggccagcccgcgcccacaagaggcgaaggcaggaaaaaaagaggcagaagccagaagaaggaaacaccaagcagcaaccgcaacaacaacaacaaaaggaccacaccaaggccaggagcaagagccgaggacagccaaccccaccacccacgcaccaggccaagcaaacaacagacccccaagacagcaacgaggaaaggggaccaagcgagcagggaaaggggaagcacagggagaggacaaagaggggggaggaagggggaagccagagaaaaaacaaaacccgcagacgggaaaaaaagaaaagcagcgagcacggcaagcagaggcagcaaaaagaagaaaggagagaggggggaaacaaaacgcccccaggcaggaacaacccacaggaacagaaaagacccaaaacccaaagaacgagcccgccggacaggcccaagggcacacgcgaaagaacggaaaagcagcacacccaaacgcacacaggacacagaacaaaccaaacccaggccaccgccacgaagcgcgaacacgaaacccaaaacacaaggggcggccagccccacccagaggcccaccccccgggggagccgggaggaaaccgagagcgggacccgagagcacccagggccgcaggggaagcacccaaaaggagggaacaaggaaaggaggagagagagagccaagcaggccccggccagccagagcgagaacagcgccacacgcccaacaggcaccaaagccacaaacccaaaggaaacgggcagccccggccagacggaaaaacggggcgggaccacccacacaggaaacagggaacacgcaggggacaggccaggccaaggaccgccaacggggcacgcaggaggaggaacgacaggcacgacacaagcagaaacaaaacagaaccccgcaagagacagggagaaagcgggggaagggaagaaagagcaggagcgcccgcaccccccggacgcccggcggagagaggccagggaggaccaacaagaaaccacaagaacccagaaaaggcggagccaaggggccaccgagaacaacccacgaagaacggcaaaaagcaaccacaaaagcgacaccgcaggaaccgggaacccagcggaaccagagcgggaagggaagacagaaccggggggagacaacagcaaccaaccacaagcgcggccccaggagaccaacacacacaaaagaacaagaacaagcagagaggacaccaaaagacccgacccaaaacaggcacacaagaacaaacgacacaacacagacagagggagagagagagagagagaggaagggagggagggagagaggaggagagggagagagggagagagggagagagggagagaaagcaccgaaggcgcgccgagaggccgccagagccgacaaaaaaagccacagccaaccaggacgagcacagggcccgaggaggcaggagaagggacgaaggagcaaagagggcagcccaggagggagcaacaggcaacaggccagaccgccggagccccggggacggaccaccaaccaaagagacacaggacggaccaggccgccgcaagaggacggccggaccaggggaggagcagcccgggccgagagggagccccagaggggaagcagggcaggaagaaggaggggggagcaccccaagaggcaggggagggaagagggagggggcgaaggggagaaggggaacagcagggacacaacggaggggaaaaacaacgaaagaaaaaagaaaaaccaaaaaaaaaaaaagaaaagcaagagggccaaacacaaggacagaagaaagcgaccccggcacagagagggagcacaagaaacagcaacacagaaagccacgagaaccccaacacggaaaacagaacagggaacacggagacaggaagggaaggcgaaggacacacgagggcagggccggggagggacagaccacagggacgaacaacagacagggacaggaacaaaggccacagacgccaccaggaagaaccacaaagaacgacccacaaagggcaaagcaaagagcaccaaccagggcagaacggaaaagaagaggccaccccccccaccacaccgacggggccaagggggcaaggggggaagcacccccagacaaggcacaggccccaccaggacgcagagaggagacccacacccagcagagggaccccgcaacggagggaagaaacgagaccagcacaagccccaaaggagggagaacccaaagccccaaggagcccccacacagggagagaagaaggccccacaacaccgaggaggaacccaacacaaaagaacacacagacagcaccacgaaagggaaaagcccagaaacagaacacacaagaacaagcaaaacacagaaaccaagaagaaggaagaccaaaggggaacgcccagaaggggaaaaaaaacccaggaaggaagacaggacaaagcagagcaagacggaaggaaggacaccagagacgcccacccagggaccaaccaaaacaaccaccaaacccagacaagcaagcagcaggagcgacaggagcgaaagcgccggaggcagccaggccggcaaaaaaaaaaggagccacagcacaggaaggaacacagggcccccaaggaggagcagagaaaggcccaagggacaaccgaggaggaacaacaaagaacaaccagacccccagaacggccaggcaagagcaggggaggccagcgccacaagggaggagaggcccggccgaagacaagcccccagacaagggaagccagggccaggaagcagaaggggaggggggagcagagcagggggagggaaggggaccgggaagcggagagaaagaagaaaaacaaaaaaaaaaaaaaaaaaaaagaaggccccaaggccaagagaaacagggagggcacaaaaaggaaggagacggggggggaggaagggaggcgaggccaaaaagcccccaccaagccgccccgcggacgaaagccgcagaccccagcacaggcgggcacagcccccaccagagaaggacaagccgaaacgcagcagggcaggacacccaagcagaaaaaaaggcacagaaaaagaaaaaaaaaaagcggaccaaaaggagaccagcagaagaaacaacgggggagaaggccaccaaaaaagaaacacgcaccagccccaggaggagccaacgaagcaaaggacacaggcaaacgacccccaagacaaggacacaacagcaagcacagagaacaagaggggagaacgaggcaaaagggagccaaccaccaccccaaggacagcagacacaagaagagggggcagaggagggaaggcggacagacaggacccgcccccaaggaccccgcaccggccgcagcaaaaacagcacaagacaagccagagcacccacaagaaagggaggggccacaagcgcaccgcaacaagagacaaaggcagaagggagaacagccagggggagccaggcggggaccacaccacgggcaccacaccaggagaagaacagaacaaaagaagacaggacaagggaaaagaaggacacagagagaacaggaagggacaggagagggggggggacgggagggccaaaaacagagaaaccaaacaacaaaagaaaaaagaaaaaaaacaaaggaaaagagggcagcagagacacaaaaaccccaagaggcagaagacgccaaagccaaaccccagggccacacggaacaaacccaggagcaaaaagcaccgggcgagaaaagaggcagccacacccagcacagccacacgagggaagcaagcagagacacagaggaggcgccccggcgccaaaagccggccccaccagcccagggaggagaccacccacacaacagcaagaaaaagcccgcaggccagacaaggcaggcaacccaacagaggaaccacggaacaccaccagaacaggccacaccagccaagcaccgagaacaccagacaacccacgcgaccccaggagccgagcggagagaaagaccccagggccagacccgaaggacacccacggaagccacgggagaaaaaacaaagcgcgccaaagaaaacaagccgagacaagcaaacaaccacacgaagaaagccaggaaaaacacaaggggaccacggaccaagcccaaggagccaaagacaaacaggccaccaaaagggggaagggccagacggggcgacagcgccacaagccgggaccgaggccaccggaaccacacaaaacagacaaagcccaggcgcgacccgagccccccccaaccaaccaccggcaccagacagggccccccacgccacagcccccaaaaggcaaggcccgggcccgccacccaacccagcccagaaggcggcagaaacgccaggacggcaaccagggcacggcccaccaagaagaaggagaaaggagccgaagaggaggagaaaaagaaaaacacaaaaaaaaaaaaagaacaaagacacaaaacaaaacccacacaacaagaagaaacacagcagcagggaaagaaacaaaaaagcagccgcgccaacaggcaaacacagacaaggcggggggagcagcgcagcccgcgggggcaccaagacacagccggagagccagagggaaccccaagggaaggaggaaagcacagcccacgcccccgagcaggaccgaaccaacacagggcacgcgggggcgccaagcaggagaccgcaggcgcagccaaaaaaaagaagaggcagcaaaaggaaccaagcagggggcgcacgccaacccagcggaggcaggcagacccggaggaggccacccggcacagaggaaacccgcacaacacccccaccccccaccccaccccccaccaaaaaaaaaaaaaggacaaacaaaaagaaaggaaaaggaagaaaaccgacagaaacaccacaacacacaggccacacagcaacagaaaaggccggacagacaacaaaggaacaaacaggcagagggccgcagcgacgccggaggaggcacgagcccccccccagggagcgcggcacaggacacgaacaacaccaaaccacaggccacagccaaacacgacaagagggaaaggggccccggcaccaccccagaacaagcagaaaaaaaaagaagaacgggaagagcaaagggagccgagaaaaaacgggaaaaaaagaaacaaacacaacagggcaccccagggggagcacagcccacacggggcaacagccccccagcccggagccaccgccgacccgagacaaacaaagggccacagcacaacacacacaacaccaaaccagacgacaaacacaacgaagcccgcgcggcgcagagacagaaccgaaggcgaaggcaaccacggagacgccagcacgccacaaggaggacacaggggacgcagcagggaccaggcgcagggaagcagagcccaacacagggaggccaaaggcggcacccacagaacagggaaaccaggaagaaacacaaggggcccaaggaggagaaaaggccgaccgccagaagccgggagagacgaagccggcacagaggcagacccacccacgcaagagacagacgcaccaaaacccagccccccccccacacacacacaccaaccaccaggggagagccaaagaccaggccgcgacccagaagcaggcagagaccacacagaccaggcccagcaagaacacaaccagggcacagacagaaaaggagcagcagcacacaagcaagaaccgcaaggacgacggccagaaaccccaaagaggacacgcgacaagagccgccggcaagacccccagagcgacccagggaagaagcaacgcacgggagccaccagagggacccgacgacaccgcagagaccccaaaagaaccacaaacaggagaggacgaaacacgaaacccaccaagggaacaaagaccaacagaagaaaccccaggaccccgaaacccaccagaacgcggcggaggcacaaacacacacacacacacacacacacacacacacacacacacacacacagcaagggaccagagagaagcaccgagcaaagcaacaccggagacaacagcgccggggggacagcccagcccaggcccaacagccaaccaagccacagagccgcccccaaggcaggacggcagggccacagccgacacagcccgagaaaaccagcacagccgcgaccagggaagcgcgaccgagcccgaaacggaagaaggccagcagaagcagagcccacgacccccacaagccgcccccaggcgcgcgcagaacacaggagcagcccgccagcgccggacggcaaaaggggacacaaaaccgcaggaaccgccaacccagccgccgacagccacgggaaacacaggcaacagaaaaaagggaaggaacggagaaaacagggacggggggggaaagcggcccaggggggcacaggagcaggccgggagaggcgggaggaagggcacggggggggcgaggcccgccagcgacggaagcagcccccagccgggaacaagaagagaacccagccccaggccgccgccggggcaccagccccacagaaaaggaggccagccagccaaaagcacagaacccgcagcggccagggccggccagagcaagaaagaagacaggaggcagaaaccaaaagcccaaaccggggcgagcccaggcccaggacggcccccaagcaagcacaaagaccgaaaggccgccccaaagacaccaggacccaacaagacacagcacagagaaacaggaagagcggaagggacgcagaagcaacgccaaggaaggccaggaaaggccggaggagggacaagccaagccagccgggagaccgaggagcagcaagcagaggaagcaccacagagaggaagaacggacaccccaggacacgaggcaacacacagcaggccacaggacaagaagaccccccagagcccaggagacaaaagaccaacgagagccaaccggggggccggggggcagagagaacagacggcgaaaaacaagacagcaacacccaacccagacaacagcccagcccccaagaggaggagagacaaggaggcgccaggccaagggggaaaaaaaggaagccccaaaaggaaagaggaacacaagcaaacagacaggaaagcaaggacagaaaagagacaagacaggacaaaagagcaggagccaagcaggcacagcaaagccggaagagggaaagaaagcaacaggaggcacaaagagcaagagagaacaacaggccaagcagagaaacacggcaaagagggaacggagacagacagaaaaaagagaccaaaagccaacggagaacagaacaacgagccagagccaagcacacacagacgcaaaagggagaacacaccagcaagaaagcaacacagaaacggcaagaaaacccaagcaaaagggacgggaaaggaccgagaagaagccgcagggaaggcggaaaaagaagcacgcacccccccgcgacagaaacccaggcccacacccaagacgggggacccggacaagggaggagacacagacaaaagcagaccggccccaccccgcacccagcccaccggcaacccgcccccaacggaacacagcccagcccccccccccccccggggcagcccccccccacccccacaggcaacccccggcccaaccggacgaaaccagaggcggccacaaaaagcagcccggagcaggagcaagagcaagggcacaccgccccgcaaggcggccacgcgccaagcaaaagcaagaccaaaaagaaaaaagccggggggggggggggaggcacaggaggaaccaggaaaaaacaagaaagaaaagagaaagacccaccgacggcaggggaacgacacagcggagacacagagaaaggagccaggaggaaagccccagagaccaacgaaggcaccaaaggagcaaggaggaaaggccccggggggaccaccgggcggagcggcaaagagagcaggcgagaagccaggggaagcaagccagaaagaacacccccaggcccgcacagcccgcccgaccgcgagccagccgacccgggaaaacagcagaggaagaagccgaaaaacccccccccaacgacggcagagggcaggaaagaaacccgacaagacaccacccaagggcccaggcaggcagagagaaggacaaggccgaacaaagccacaaagcagggacccaagccgggccgcaacccagagaccaaggacccagacagggccccagacagcgagccaggcgaaggaggacacagccaggccaggcagacacaaccacagcagggcccgagaacaaaacacccaagccagaggccacgcacaccaccaggaccaaccagccacccgcccgacaggccagagaaccggcaagcccacacccagccccgccagccgccaaagcgagacccaggcgaagcccagccaagccccaaaggaaacaccaccgggcccagcgagaaggaaacagcagacaagacagggaaacagaagaaaagaccacaagacgaccaaggaaacacgagaaaaccaagcgggaacaagagagcaggagcacgaaagccaggcagacggccacagaagaccgcagaccagaaacgcaagagacgcaaacaacaccaacaaacaaggaggggggggccacaaacaaaaaggagggcagaaagaaagacccccacacccaaaaaagaaacaacaacgcaacaacaaaaacgccacgaggcgcgcgagcaggccagagaagcagccccgcacaagaagccaaggcagaggacacgcccaagaccagagcaccaacaccagcagacccagaggccccaagaccaagcgcaccacacagcccggcccccccccgaaccacaaaagcaaaagacaaaaaagagaccaaagcacaaccccaggcagccaacaaacccgagcacacacccacccccagcccggacagcaaagcaaaccccaggcaggaaccagcacgcaccacgggcggcaaacccaagcacacaggcaccgaaggcccaagcaaacaagaggccaggaaacgcaagggagggagaggccaagagcccccggagcagcagggacgcagagaaacagggaagaggggagcgagagcccggcgcagccgagaaaccaacgaggaggcacagagaggcggcaaacgggggcaaagccagagcgacgccaccacgggagaccacaagaacacacaagggggacagcaaaccgggaggcccgcaaggcgcagaggccagacggccggcgaccgaagcagacagaagcagccgaagcacagaaaccccgcccgccgagacagcagaaaaaagcaaaccaccagccgacaaaggagcacaagagaaagaagacgaaagcagaaacaaaacaaaacaaaacaacaacacccaaacccagaaaccaggaaagacccaaccacaccgcaagacaaacccgggcgacggagcaacagaccaaccaccagaaccgagccagcgcaggcggaaggaggagggacagaccaacagccagcggccgcagcgcaggaacgggcgccgaacaccaaacgccgaacacagagagcaccgcggcacccccaaccacgaagccccagcgcaagcacgggcagaccacggcacagaagggggcggcccaggggagagaagcaaagaggaagacaagaggaaaaaagggagggagacagggagagaccgcgccccaccagcaaaccacaagaggagcaagcccaccgacccgcaagcggaacaggcgggaagcaccgaggaccgccaagagggcacgcggagggaggaagaaacgcccgacgagagcaaaaacccaagggcacagaccaggcagggccagcagagcccagagccgcgggcccaggaaacaaaggagagcacagcaggaggcgcagaggacccggccacggagggcgaagcacagggaggaggagccaaaaggagagcgacaaacaacagcgggaaggcccgcggaccacccccaccacacccagacgccacacggagcaaaccacgccaccagagaaacccacagagggccagaggaggaggaaaacacacagcggcaggccaacggaaaacacagaccaaaagcaacagacccaggcacagccacacgaggaaggaaagcaggaaccaagcagaaaccacggagggccacggacggcaccccggaccagggcagcccgcacagcccaggaccaccgccaaggcaggcaccaggacgggcgggggccccaaacaacacaacaaaacagccccaaagacagggccacaggccaaaagaggaagcaaccccaggagacagcaaaacagaggacagcagggccgaaaaggccagccaaggacaaagaagacagcaccaccaacagaacgggcagcccaccccccgaagcagggaagcgggaggggacacccaaccggcagagcacacaagccagcaacaagcacaggccgcaaacggggaaaaaaagcaagacaaaacaagaaagcaagcagcccgggcgaaaggcacggagcccagaaaccgccaaggaggaggaaggcaagaggaagaagcaggcaagagggccaccccaagaagagagcccgacccaacccccgcggaggaagggggcccaccacaggcccacaccgacacaccccccgagggcaaacacaaagccaacgaccaaacaaaacccgaaccagaagcaaagggccaccgcgcaagcgagcagggcggcagggaggaagcggcaacagccacccgacacgggcggcacgggaaggcagaggagcagggggcagcacaccaacaagaggggagggggaagcaagccagaaggacccaaggaggaacgacaaccaaccaaaaccaaccgcaaggaagccaggaaacccccagggacagaacaacgggcagggcaagaggcacaggagcagcagggaggaaaggacaacaagggccccaggcgcggccacggcaaacggagccccaggccggaacggccggcaagccaggagccgccgcaggcggcagcaggcacacacgccaaccagccacaggaaggaacgagcaggcacagcccaaaaacagcaccgcgacgagacagccaccacaggaaacaaaagcaaagcaaaaacaaaccaacgggggacaaccagaccaaacacacaaacccagccgggacgaaaggacaaaaggggaaaaggaagaggaggaagaaggaggggagaaacaggagaaagaggaagcagaaacagagaaaaccgaacacgaccgaaacgagaaaaaaggccagccggccggcgcagaaaacagagagcacagggacacacacggagagaaagagaagggcggcacccagaagaagacacagaggcagaacggcacccccagccagcaagcaaaagaaggcagaacaccaccgccagcacaaaagacacacagaaagagccaaaaacacaaacagcggccagagcggccagcggcaggacgccagaaacagaacaacgaccagcacgccaaaacagagcaagcgcagcggacccagaaggagagcagacaagaaccaggcaccacaaaaaggaacaaggcaacgggaacaaagacaggggggaaggaaggagggagggaagaagaggagccaacaaacaaggagggaaggaaggaaggaagggagcaccggaagggaaacaaagcccccccaaagcaccacaccagccccgagaagcgacaccagccaccccaacggggagagagcaagccgacccccggcgaggaagacccacacaccagcaagcaggacaaacacagagaacaccagagcacaggagcagccggcgcggcacacgaaagggccacacccacgccaacccccccaaagcaagagacaggcaaaacgggaagagggagagccagcacaagcgggcaggcagcgaggcagggccggcagggcaacgcagaaccagccgccccagaggcgagaagcacagcaggggggaagacaggaacaaaaacgagcagcccccaccaccccagaaccgagagaagccaggcaggcggacagacgcaccaagcaccaggaagagaggaagaccaagcaaaaacagccgcgcaacagcaagcgaacaaccagagacggaaacgccaaaaaggaagaggcggggagggccaggggaggcgcacagcggggaggccagggccgagcgccccagcacagaaaacaaaaagagaacaagcaggcagagaggcagcaaaccgaaaaccaggagaccgagacaagagagcaaagcaaggacagccagaaaagaaccagagaaagaccgagccaaacccccaaaaccaggggcccagagcgggaacgcagcccggcgccggcaaagcagagaggcgcacccagggacgcccagccccagggcccacccgcccaccccccccgacacgagcagcaaacgcaccccaagaccaggaacacaggcgccgcagaaaagcgaggaacagagcaaaaggggagagaaaaagaacccccacccacgacaggggggcaagcgagcacacaagcccgcacggcagcccgccccggccagggagggcggcgagcagcaaggcagacggcgggaggcagccgcggacacccaagcacagacaagaaagccgcgggccccccccacccagaaacgaccaccaccagccaccgcccgccagcgaaaacacgcagaaaagcagccaagaaaaaaacacccacacaggaacgcagacaagaaggaaacagcaaaagaagcaaaagacacagaaaacgaaagaacaaaacaaacaagcagaaacaaaaaaagagagagaaaaaaaagaaggaaaaaaagaaaagaaaagaaaaaaagggccaaaagcacccccaaaggcagagcgacgagccggaaacccaagggaggacagggggaggaagaagggagggggggaggccggcccgccaccccagccagccagcccgcccgcgcccacacccaagagcaagcccgagcccccggccccacaggaccgcccaacccgccccgccaaaacaggaaacacccggcggaaacagaagaagcacacaggcggccgcggaaaacccgagcacccagaccagccaagcggcaacgcgcaaaggcgagggaagagagaaagcggcaggcccacagacccaacagcaggacacaggcccgcaggcgggcaaagcccaggaagcggacgcaggcggcgcgggggggaaggcgaagcgcggagggaagcaagacagacagagacacgacccagggcgccacgcccacggaggcacgaggcggccacccccgcccccaccgccagccaacagcagagaagaggagcagacagcacacccagggaccaaacgaaccgaaaggagacccagaaaagcaaaggacaggaccggaaaagacaaggcaggcgggaccccaaccccaaaggcagcgaaacaagggaagaggacacccccccgccgcggaacacagcaacaacgcccagaaagcagccacaggaacaacaaaaggggggcagcacaaagaacagacacagcaaacccagcacccagaagcagccacagccaaaacccaggccacgaacaaaccccgcacaaacacaagcaagcaggcgcacaaacaacagccaaggaaaaacagaaaaaaacgggacaaacaaggcagcgcccaagccaacccagagccgaacacaggagagaaaaagagagcaggacacgacagagagccaaggcgcggacacaagacacacggacagagaacagaagagaggggacagggacaaagcgcaaaaccgaaaaaacaaacacaaaaaagagaagggacacaagcacccaggacgccccacgaagcagccggaagagcaaacccaaaaaacagccccaaacaaccagggggaaaggggaaaaaaaaacgagaaccaagaagaaaaagcgcccaaaaaccaagccaacaaaagaaaagagagaaaggggaccccagccggaccccgacgggcagaggggaggaggggaggcgagcggccgccaaagacacaacagcagggggggggcaaccgcagaaaacgaagaccagacaacggaggaaggagaacggacaaccaagaagaaggagaacggacaacccaaaaaaaaaaaaagcacagaaaagcagaagagcaacagagaagagccccacggcgagacccagagagaagcagccagggcggcacccacacaagaaagagagacgggagaaccaccacagaaaccacgggcaaagccacacagcagccccaaagaggagggccaaaaagaaaaacaagccgggcgggggccagccaacccagaaccgggagacagaggcaggcagacgagcgaggccagccggcacagaggagccaggacagccagggcaacagaaaaacccgccgaaaaacaaacaaacaaaaaaaaaacaaacaaaagccaccaaagcaggcaaaaaaaaaacagaaaacaaaagaacaaacaaaaagacagcaggaagcaacgccagcaccaggacccaaacgagacaaacaagacacagaaaggagcccgccgccagacaaggaggcggcccccaagccccccacaggaaagcgcagaccgagccccagcgccagccccgcaccacgaaaccagacaccaggaggaacaagaaggcgcccaggagcgagagccgcagaacagggaggagcgagccgcacccgccccaggaaagaccccagacccgaggggaacagagcaggaagccgcagcacagcagcggccaaggcccagcgcccaggaaagaggaagaaaaagcaagaagaaagcaagaaaaaagcaaaaagggcgagaaaggaaaaaggacaaaagaaaagaagaaaaagaagaaaaagaaaaggggcacccccagcagccaaagagccaaaagcggggcacagcagggagcgagagccacagcagccggaaagcacgacacacagagcacaagcggagaaaaccgagacaagaagacgaaaggcccccggaaaacacgccagcacacacacccagcccggaagaggaggcgcaaccagggccccaagccacagaccaaaggggagacacgccccacaagggacagacaggacaaacaggggagcgaaacaaaacaccgaagccagaaagaagcccagggaacaaggaacccaccccagggcaaaggacccagaaagacgcaacaacagccgccccaccgcccggaccgaggggacccccccaccccgacaacacccccccaacaccaggaccagggccaaaagcaaaaagacacaagaaaaaagccccaaacccgacacccgcccccaaaaaacgccagcaaccaagagcccagacgccccaaaccgcaccggacagccaaagcggccagccccaggaggcagccggcaccacgccgccgcagcccagccccagaggcccacacagccggacacaaggaaacagccgcccgggcggcccacagcgcggggccaaagaggacacccaagacaacaagaagcagcaaacagcacagccccacccgccagcagccacccccacccacacaaaaagcagaaggacagaaagcaggagcgcccacaggaggcagggccccccagagccccgggaccccggccacccagcaaccagcggccagacagcagccaccaaagcaaccacacgccaggaggagaaccaacagccagcacacccccccccccccccccccccacccaggggggccaccagcccccccccccaacccaaaccgccaaggccggggcacagccgcaacaccggccggaagccaagagccccccccagagaccaacaggaggccccggcgcaccacccacacacagaggcagcaagagcagagaccaggcgcccagcagcacggggccccacccccaacaggggaagcacgcgcaacggagagagacagccccggaacaagcaggcagaagaacaaggcaagggcagggccgaccacaccggaggagaaagagacgggcccaaaaccagacacgaaagagagggcagcaaaggaggaaagaggaagcgggcccagcccaggcagaagccggcagcaaggcagcccccaccgcccagacacaggagcagacaaaagaaccaccccagggcacaccggaagacaacaaaccaaagcaacacacaaggcaaagcaacacacgagcacaggcagccacgcacgccacccaacccagcgccgcccaccaccaggacacagggaccagaacagccagcaggcagaagcccggcggcagaagaagcggcaaaggccggacaagccccacagagcccaaagagccaggcagccgcgcaccccaaagccagaaagcacccaagacaccaaaccaagcagggcgacgggaaagagcacggcaggacaggagaacccgaaacacagagcaagcagacaaacacagagccccccgaagcagcgcacggcaaggccaaaagcaagaaggaaagcaaacgaggcggaaagcacgggcaagccggagagaggccagggagaccacaagcaggagaggcccaggcagccagcacccacacagggagcccacgccaaagcagcccagggggaacacccccgaccaccaggacagcaagcaggaacacaacaacacacaggcacaacacaaaaaaaaaagaccaacgggcagcagaccacaccgagaggaaaaacggggaaacaacaacagagaagcagggagggccgggggcggccccgcagcgacagggggccagacagaggaaagcagggggaagaggagagagggcgaagagagcggcccccaaggcagggcccaagaagagggcacaagcgaggaagcgcccagccgcggacccggcaccagaaaggccacaccaaggaaagcacagacaagcccggcgagggcaggccacaaacacaagcaaagaaaagaccagcgccagaaacgaaaagaaacaaagcagagcaggccaaaccaaagaagcaaacaaaacgagccaccgcaaccccaacaaggagaggccgccaccagacgacaggcgaccgacaagcagcggaccccagcacacggcaaaaggagggggagaacaggcaagcaaggcgcgcacaaacaagaaaaagagaaaagccaaaggagcggcaccaggcaacgccgcagagggagagaaaaggggcgggacgaaacaggcagcaaaaaacacccgagacaccaggcaccagggcacagggccgggacgggagcggcccgagcaacagaccccaagcccgcgaaacgaggaggcaagagggggagcaggcccgccccacaggaacaccaccagaccccaaacccaccagaagcagggacgcgcaccaggaacccccccccacacagcacacgagcagcaccccagccaaaagccaagaagaaacgggagaacaggcgaagcccaaaggaagccaaccccgggccaaaagcaccccaggggcagagcaacagcgcaggggacagaggcaacgaaagagaagagacagggcaggagaggcccgcgggaagagcacgacgcaccaaggccgagcaaacccagcaaccacaggggccacaaccacccaaagagacgacacccccggggcgaagcagcacagacagaaaaaaaaaaacgggcggagcaagcagggacgaggaggggaggaccggagcgagcagaggccaagaacaaccccaacaacaacagaaggccacaaccacgacagcacagggaccacaacaaaaaaaaaagaaacaaaaaaaaaaaaaaaaagagaagagacagcacaaaaaaagaagagagcagcgagggccgggccagaaaccacccacaccagcccaagcacccagaacgggcgagagaaaacgggaagacacggggccaaaagccaagcccgccaacccaacaagcgaaaaagaggaagaacaccccacacgcccccaacaagcacaacaaagcgagcggccggcccgcacagcccaggcagcggcgagggccgcgacaccacccccccgcagacgccggcagagcccggcggccagccccggccacaccaggagcgcgggggccgaccccacccagcaccccagcgacaaagcgcaaccaccccccccacccaccaagcccaagggagaaacacagcagcaagggggcacgaggaacaacccaaaaggacccagacacggagagggcaacggacacaaagagagcgccacggacgagggaccccaacagcagagcgccccacagacgccgccgggggcgcgggggcgcgcggaggggcaggggaagaagggagcggagacagggccggagaccggggccggaaccacgaaacccggcaggcaaacacagggacccgcccgccccaaggcgaggcaaagaaccagcacgccagcccggccccaggaggcgaggggaggcccaggccccgcagcagcagccagcgcaagaacgaggcgaggagccggcgcagggagccaggaagagcacgaggccacacaacccgcacgaggcgccccacccgccggccacccaggggacccacacccggaggcgaccagagcagaaagccgccccggaggacgaccagacaagaaaggaaaagccagacaaccacccccccaagggccggcagggagagcaacaaaccaacgaacaaaccaaaaacgaaaagaggaaaaacaaaggaagcccagagggaaacagacggagccacacaccccaggacccagaaacgaaaaaaaaacaaccaagcgagaacagaacagaaaggcaccagcaaacagcgagcacggaacacagcgaaccagcacgggggggggggggggggggcgaggcagaagccgagaaggccgcaggcagcagcaaccaaaccagccagcaccaaaaccgagggaaggcgggaaaggccagcaggagggacagcgagcaagccgggaccgagcaacccggaacccacaaaagacagaaggagagaccgacccacaagcggccccccccaaggcagggcacaacaccccacaccacacacaaagcaaaagaagaaaaaaaacaggagggggaaagcccgccacggaagcaaggcaaaaaaaacagaaaagagccagacgagggaagagagcgcaggagcaggagaaggggccaccggggcccccacagcccggccagggccggggagccggagagggaagggggcccggagcagcccgccaccgcgggcaggaacccaaggagccacggccaggccacacgagacgcaacgacccccgacaacgagcgcggaggcagcggacccaaacccacaggcccccgccccaggggggcccaccgagacgccccagccaggcccgaggacccaaaggggcagcgagcacggcaggcagaaagaaggcggccaccaaaggcccaggcgggcccggggcagcagccgaagcggcggcgagcaagaacaccgccacgccacgccaccaggagagcaccggacaggagaacagaggcccaaggccggacgaagggagcggacccgaaccggcaagaggaacgacaccagcgagccacaggcccccacccaagagaagccaagacgacaaccgcagcagccaacggaaacgcggcgacgacaacagcagccaagaagggcggaaaaagaaaaagcgcccaaccccccgacccggcggcaaacggacacaacgagagagccgagcagggaaagagaggaggagacacggaacccagcgcaaaaaagaagacgagacaagccacaaggacgaaaggaagaggccgcccagaaagacccaggagcaaacgcccggcagaccagaggaccagcaggaggaagaagaggccagagacaaaggggggaagaagacggccccaccagaggagcacacccacaccccccccacacacacaccaggggggagggggaggggacccaagccacaaagcaggcggggacgaaaaggacaaaagcaaacaacacagaccagagaaagaggggcaagagacaaagagaaaagcacaaggacacgaaaacaagaaaagcgaaaggcggggaaggaagccagcgcaagcaacacagacaagcacgggaagggagaagaaaggggcaaagcccaaaggaaagaagaacccagaaaaaccagcggcaacaaaccagcgccagcaaagcagagaagcacagaagcacagcagaaaaaaaggcgaacagaagacagggagaaaaaggaaagaaacggagaaagcgggagaaaagaagagccacccgagacaggaccggcgacgcagggaggaagagggggagggaaggaacgcaaaaagaccacggcagacacagcaccacccccgggcgggcacccagaacgcagcgaaagacaacggacaaacgagccagaacagccaggaaaagagggcaaacaaaaaacacggggggggggggggggggggggggggaaagagagagagagagagagagagagagagaagaaagaagagaaccaggcagcgccaaccccaggcaggaagaaaacaccccagagggacaggacccagaacacacggaaaggcgcaagcccagaggggcacagacagacaccacacgccaccagaaaggaagacagagcgcaacaccgaccccccagcggagccaaaaaccccaacccaaccaaaggaaaacgccgcagaaagggccaccacgagccaaccgccaacccagcccccaaagaacagcgaagccgaaaccacaaaggcagacaagcgcgacgcgcccacaaccccgccacccccccaagaacaccccaggcccccccaggcagggcaaaaaccaaggaaggagcaggccaggaagggagggaaaagggccccgcaccccaccacccacagcaagcagcagccacagcaccccgccaagaagggggagcaaagggcaaagcggccaagaggcaccacacgccgcgagagacagcacagacaggcggcaccagaaagagccccccaaaacggaccagaaaaaagaaaggaaaggaccaggaaaagcgcccaaagacagagccggcacccagaccagcaccaggagccagcacaggacacccaggcggggacccagcaccagcaaaaaaccaccggaagacaaaccggaaaaaaggaaaacaggcagaccagaaggaagcaggaacgggggcaagacaggaccgagagcccggcgccagaaccaagcggcccaaaccagaaacaccgcccgcccccgaggcgggaaaagcacggccaccgcgcggccaagcaggaacgaccaccggaagggggcaaaaggagcagcccaccgggcgaaaagacaaacggaggagcagaagacaaagcaacaagcaccaacggaacgccgcgacacaggcaggcaccagggaggccaagaggaagagaaagcaggaaaagggacacaagacagagcgagaggacacaacccccaagccagccgcaggagccaagagggaagagaggaggccacagcacacgagcagccccaacaaaccccgcacagcacaagccagcgcaccgcagaagccgacggggagcccacagcacaagccagcgcaccgcagaagccgacggggagccggcacacaccagcgggggggcagggcaagaagaaggagcaccaaccacaggcagaggaggggccaggccacaggaagacccggcgaggaaccacgaaagggccaaggcccccaggaccaggccaaaaccacaccgcccagaaagccaaggagcagcagggcccggagcggaggacccgacccgccgcaccccagggcgggacaagacgccaccacagccagcggaagaggcggggacccagccagagacagggcaccccacgagcaccccacccaagcaggagagcaaccgcccagaacagcaacgcggcccagccccagagaaggaaggaaccaagcagaacagaggggcaagccagagaaaacagggggaaaagccaagccgcccaggggaacgggcccccgcaaagcgaacacgcaggaagagacaaagaggaccccagagaagagcaagcaaagggagaacaagcccagagccccagccagcaggaaagcaggcagggagaacaccccacccccacaacaaccacaacaggagccaaaagcccaaacaggagaggacgaccgaaaaaaggggacaaagaacagaagaagaaaaccgaaggcaccaaagcaagaaaaagagaagggagcagccccgggaccgcaaggcaaaggcacggggcgaaaagacagccccccgagagccacagcaagaggccacaaaaaaaagaacgcgcaacaaacgcagcaaaaaaaccagcccgaaaccagggaacagaacagggccccgcagaccagaagccaaaggacacagaaagagcaaaagaccccccccaggcccaggaggcaacccaacccaaagcccgggcaccagagccagacggacaagcaccagggcgaggagacagccaaagagaaggaagacaagcgggaagaaaggccggccacgggaagcacgccacaacgggggggaaacaaacagaaacacagaacagaccaggacacaacagccacacaggcccgaaggccaaacggaagaaggggggggcagggaacagggcaggacagccaggaagcgaacaaacaaaccgccccagcgagagggacagccaggcagaccaagccgcagggcggcaagggcgagcggaacgagaaaaggagaaaccacgggaccgaaagcaacaacagagcaaaggggcccagaagagccacccgaaggccgcagggagaggacaaccaggacacagggcacacggcacagaggagagcaggccaggcacagggcagcacacagagaacagaaaagggcgcgcacggcaaggaagcggcacgacgaggcagcaggggacacacgcaaccaaaaggccacagagccgccagagcaccaggccacgagaaaaggaaccagcgcaacgaacacagaaccgccgacagaagagaaggccccaaaacccgacaggaggcaccaaggcggacacgaaagcaagcccaggggggagaaggggcggggaaagggggccagcacaccaaggaccgagcaggcccagcacgggaaaaagcgagccagacaagcgcacaggggcgaggaggaagagcccacaagcgccaggcgaccaaaggagcccagcagggagcaccagcccaaaaaaagagacagaccaaggaccaccacagagggcccgacccccccccaagcaacgaggcccaaaacagagggggacaagcgggaagaaaggagaacaggaaggagggaagagagggggaaggggaaagacccaacacagcacgaagggcccaggggccgggccacacccacccgcccaggcaaggaggccaagccaccccacccacaggaacacgagaaaaacccagaagacgacagcaccgaccccggaaagcccaggagagcaaagggccaccgcagcaggaaaaggccaaagcagccaaaaggaacgaaccgcgaaaaccggccccaaaaagaaaaaacggaaagccacggggacccggacacgccgaaggacgagagggaccccaacggccgaaaaaaacccgcgcacaacggccgggccaccaggggccgaagaagaccagacgagggcaggggcacagcacaaccaaaaaccaaaaaaaaaaaaaaaagaaaggaaacaacccagaccacggcaaccaaaaggccgcgccaacacccaacacagagaaaacgagaaagagacaaagaaacacaagagacaggcaggggacacgccaacccagcacgggaggcagagcaggggagcgaggaggccagccggcagaaaggaaaaaaaaaaaaaaggaaacaaaaaggccggggcgagacgcaaagaagccgggcacacccgagccacgaagcaggcacccgggaaagaaagggaaggaagcaggaacggcgacaacggcgaccagacaccagcagcccgcgacccgccacccccccaagagaacaagaaaagcgaaacaaaccagagcagaaaagcccccgcagaacacgcccaggccgcacgacaccgcgaccaaacaggcgaggaagggccaacaggaacggcgccaacccagaccccacccaaaaaaccccgaggagccagggcgaaccacgcccgggagaacgcgacccggagcccgccaaaacacccgggacacaagggggcgcggacggggcacgccgaaagggaggaggggggccccccacagcccagcacagaggagccgggcagccagggcacacagagaaacccgcccaaaaaaccaaaaaaaccaaaaaaaaaaaaaaggaaaaaaagaaacacaagagagcgagagaaccggcaagcgagccagggaggcgagccaccgggaacgcgcacaccccggcccaggcaacaacgccacaaggccacaaacagagcaaagcaaaggcccacacaacaacgacaagccaagaagagcaagcaagaaaacagcaaaacgcgaccggaagccaccagcaccagcaaagcagaagagacgacaccgagccgcccagggaaagccgcccccccccagggccacccacccacccagcggacccccagcacggacagcccacaaccagcggacgagcacccgccgcaggaaagaagaaaaaaaaaacaaaaaaaacaaaaaccacccaaggggggggggggggggggagacggaaaaaaaaaagcacacaagacaaaagaaggcacgcacagccaacacgaaaagacaacaacgccaaccgaaacacgg

SEQ ID NO: 710 - RNA, 987 nt, Mus musculus
cgcgccccaagccccggccagggcgggcgcgcagggggccgacgaccgcgccccgcgcccgaggcgcaaaaacggcccacagggcggggacaaaggcgccacacccgccgccccccccccgggaagagcggaaaaacgcagccagcgggccgcagggcaacgcagcgccagggagaacggaccgaccgcaccaggagacccagcccccccagagccccccagagggacggggcagccaggagccaggggggcaggacgcagggccgcgggcacaggggcgaaagcgcgaggcgcgggccccgaacgcgagcgggaaagggaacggcacggccacacggcccaggagaacaaaggacgcgcccaggcagagcccacccggcaggcccccacaacaccaagaagaacgggcgagaaagcaaggaccccgaggaggggggaaacgccaggcccacggaccaccaaacaaagaggcccgggaaaagggcgcaaaccggagaccccaccgacccggacccaaaccaggaagcagagaccccacgaggcaccacccccaagcagcccaccccacggaacgaaaacaacgaaaaggaagcggaggcggacacacgcaccgccaagccccggaagcccgaaagccgccgcaaaagggccagcgcccgccccagcaggggagaagacaaccagaaggacaggccacggcacagagcagggcgcggacccgggcagcggggcgcaaagcggagcagaagaaagaaaaagcgcagagagagacacggcccccaagccaaaccccccgaccaaagcccggaccaaggccgaaaaacccgacccccgacgcaaaagacggcagcgcagggaccagggggccccaccagcccacgagggcgagagaccaggcccaaagcccaggcggcaaggccacgcccaccaaaccgagcaggcgacaggcaacaccccaccacagaggcccggccgagggcccacccc

SEQ ID NO: 711 - RNA, 1352 nt, Mus musculus
ccggagcccggcgccggaaccacgagaccaggcggcccgaaccagaaagccgcccgcccccaaggcgggaaaaggcgcaccaccacgcgggcacaagggaaaaacacaaccaagcggaaaaggcaaaaaacaaggcaaaaagcaggagggacccacaggaggaagacaaccagacaggacacaaaggagagcccacagaacaagagaacaaaagggcaagggaaacaacagacacacaagacacgaccagccccggggaggccagaagcaagggaaagcaccccagcccgcaaaaaggaaagcacaagggcggaccaaaaacgagagaccgggccagaccaacaagcaaagagcagagcccgaacaggaggcagagccggcgagcccaggacgcgcagaagcagacagacaacccccaacccccgagccaccaaaaccggcgaaaaccagcaacgcaacacgacccaaaagaggcagcgcaacggcggcgagacaagaacccgggcaaaccggaaccacagagcccggcggggaaccgggcaaccgccaggcaccgagaacaggacaggaaggcacacaccacgcaccggacccacacgaaaggccccaaaacggacagaccgcaaagggaacggggcgaaccaagcaagcagagcggcacacagccaggaacaaggcgagcaaaaaccagcggccgggaggccaggcaagccacagcaaaagggacaggacggcccgcgcccgaagaacgcagcccaagaagcagagcccacgacccaggacagaaagggacgcccgacccgacagggcgggagcacccacagccacggagagcgaaagggccggcagagccgacagcgcccggcagagccggcagaacggagggcccggagcgccgggcaaggccgagagccccggagggccggcaaagccgacaggcccggcagggccggcaggcggcaaggccgaagcgcccggcgggccggccgcgccggaccccggggcaggagcccagccaaccccacagagcggaggccggcgggcgcgcccccgagaccccgaccccaagagccccgaggcccgcccaggccgcggggcgccaccccgccagccgccgacgcagccgaggcccgcccccggcggacgcagcgcaggccagcccggcagccgcggccgcccgcggcagcgcacgaggcaccccgagagcggccggccccgcgccgcacgcgcaccccgccggccgcccgggcccccgccgcccgcccggcgccgagcggccgcagcccccgccgagggcgccccgggacggaagggccagcagccgccggcgcccgccgcgccgggcgccgcgc

SEQ ID NO: 712 - RNA, 92141 nt, Mus musculus
ccccccccaaagaccaacagacccgcacgcaacccaagaccgcccggcgaagccaaccccgccagcaggagaccaccacgcgaccacaccccagagaggccgcacagagcgagccaagaagcgcagacagagccggaggcgcccgagaggccgccagcacggacaaacagagcagacaccaaagccgaggaccgcaaggaaagaggggaaggagaaggagcgaaggggagcaacgccaaggaagaacaacagccaaaacagaacacccagagccccaggacaaacaccaagcaaagagaacagggccagaccagcccgccacggcacacggaaggggagggacaccaggagcgagccccaaagaaggaggaacagacggggagggagaaggagggcagggggaacacccagaggcaaaggggagggggcggggggagggcaggaggggagaggggaaagggaaaacagaaagaaacaaaacaacagaaaaaaaacaaagaaagagaaggaagaaaaacaagaaacaaccagaaccaaagagaaaccacagacaccgaaaagaacacccagagcgaaaaaaacaagcaggaaagccgccggggcaacaaggcaaagaagaccgaggagagaaagaagagaggcaacccgagacaccgaggcgggggggcggggggccccgaacggccggcgacggcaaaaggggaaaacagagagagcgacaaagcacaccaggagaagcacgaagaccgggcaagcaacaacaacgaaaaccaaggcaggaggcaagaggccacccacaaccccccggagcaagggccaaggcagccaagaaaaaaaaaaacccccccgcaaaacgaagcccaccagcacccaagccacaaaccaccaccgaggccgggaaccccacgggccaaccaacacaaagcgccagaaggggaagcaagagcagcccaagagcagaaaaaggagacaaacaacacaaaaagagaagcaaagagccacaaaagaaaaagacggcgacaggggagaaacacaaagggcagacacaaaggcagccgagccacacacccgaacaccccacccaacgaacagaaaacagaaaaaggaaaggagagcagcgaagcaaaaaaccgacaacacaaaggaggcaagcggccaggacaacaggcgacggagaagaaccgggacacaggaaaacaggaaaaacaagggacgagagaggggacgaacggagaaccaaacacagaagacagaagcaagaagaagaagaacagagagaggaggggaaaagaaacgccagggaggaccacgggaaagaagaaaagaaagcaagcgagccgaaaagggggaaaggagggaaaaaagaacaagggggagcggaagaaaggggaacaggacccgccccacaagacgcacaggaagcccgaaagaggcgaaaagagaaagagaggggcaaagagcagccgaagcaagccggcggaaggaaaagcggcacacccagcggaggcggccgagcccacacacagggggggcgagcaaccaaccaaacagcggaagaaaaagcagaacagcgacccagaaagcccaaggcgcaagggggcggggccaggagcaggcaaccaccagggacaaaaacaaaacgagccagcagcacaaaaacccagagggagacgaggccaccccccagcgcgggcagggcgcagcggaggcagggggaaagcccaaaccagaagagcgcgagcacaccccaacccaaccccggaaagaccccgagcgggaggggagagacaaggacacccaaggcgaggccgagaacaagaggacacaaaacagggggaagaagggaggggaaggaaggaggagaggaaaaaaggaaaacagaaaacaaagaacaggaaaaacaacaagaccacaaaaaaggaaggaagccaaaagaccacacgaaaggagacccgaacaagagaccggagacacagcagggagaccaagcgacacaagaaggaacggacgcagcacagccgagagcaaagagggagccacaggacaccagccaaaaagaaaccacaagggcaagaccgcgacgcacacagacagaaggagcagaaacgccaagaaagcgagacgaacagaagccacggcgcaccgcacaaaaggcccacgccagaagggccccccaccaccccacaacccaccaggcaacgggcacccacagcagggaggaccgagaccgcgccaaggggaaagcccccgggccaaacacacacacccccgggcagcacacaagcacgccagacagcacacccgccacgaggccagacaaggcgccgaaggcggggacgcagacagcaagcaacggccagggacaacccgccaggaaacgcagaagaccaaagcaagcgcacaaggaagggggccgggcccagccggccaccaggggcaggcgggaaccccaagggcaggagcaccgggcccgaggagccccccccaggcccaacgccccaacccaaagaccccgagcccacacggggggggcgcaacccacgcaggggaacccacagaggacagagcaggaacgcgaagaaaccagacaaaagggagacccagaaaccccaaaaccccgccagagaagggaagagcccccggccaccgcccggcacacaccaagacacacccagcaagagacagagcccccacaagaaggggaggggggggggggggggagggggggaccaaaggccgggacacacccaacgaacagcagagcgaccaaaacagcggcaccggaccagaagcacgacgacgacgacgacgacgagaaagaagaggaagagggagcaaaaaaacgaccacaggcagaccacccccacccacagcacaaggaacccagcacagccccaaacacaagcaccggccgcacacgaccccccaccgcacaggacccaccgagccagcgcagaagacccaagaaaaaggagcaaaaaccacccaagcacccagccgggaaacgccacggaacaaagaaacaccaaagaaaaagaccaggacaaaaaaagagaaaacaggggaaggaggcagaaagccacacgggaaaaaacagaggcgagaaacacgcaccacagcaacccacgaaagagcacaaaaccagcagcaacgaaaagagagacagcaagcagcgcaccaaacaacacacgaaaccgacagaccccgacaacacaaccccagacacccacaggcagaaaacaagaccagccacagcagacgaagacaaaaggagcgagggccgggcggggaaaaaaaccggagaccaaggcaggacccaaaggcggaagaccaggggaaaaacacaaccaccaagcacccgagcagacagacaccaacggcaagaaagggaacccaggcacggggaagggagcacgacaaaaccaacccacaaaaccagaaggagaaaaaggaacggggccagcgaaagaaccagccccagagggcaccgaaccgcccaaacaagacaacaagagacaaacagacaacaaaaagcacaaccagccccgccacagagaggaaaggcaagcacagaaggggagaaacaggggaaaggaaacagggggagaaacaggaagcccggagaaagaaacaaagaaaggccgagaacaacagccgaaaagagcaggaggagggcagggaggggagggccaacaaggacaaaaagagaaacggcaaaaagaacagaacacagccaacagcggaagaagggaaggcagggaaggcaaagcccagggaagccgaaaggagaggagcgagacggacccaacggcagacgaacacaaggaaagaaggccggggagcgaggcccagccaaaagaaaggaccaaagcaggaccccgccgagagcacgcgggaaaagcaaccaaaagcaccagcgacagagaaccaaacaaaaaaggcaggggacgagcagaggcccagcaaaccggaggcacaaggggcccgacacggggcaacaccagacccacaagggccggaaaagaaggcaccgaaggaagccgccccaggacaggcagcggcccaaagaggcaggcagacaagcgacaaggaaaaagcagacgaaaaggcggacaaaagcaaccaacaccacaaccaacgccagcgcgacagaggaacacacagcacgaacgaaaagaacaaaacccagggccagacacaagagaagaaagcaaaggaaccaaaccaaaagacccagaagccaaggcccccaggcccgagggggagaagaaccaaagcacaggcgaaagggggggccagacaaccggaaacccggagaggagggcgagcaagaaacgagggacaggcccacagaagccagccaacggacccagcccacaacaccccgagagaaaaaaaccaacaccccccgccaccagggggacaaaaaacccaaagcagaaaggggggagacaagcacacacacaaggccagacacggaggaagagagggcaccccggaagaagccaaaagaacacacaaggggcgagaacgaacgcaacgaaaaaaaacaccaaccacgagccaacccagccccaagacaagaaacggggggggggggagggggggggagcggagacagaccgcagagccagaagacaaaaccaagagcagagacagagagggagcgccgagggagcaggagccacacaagacccgcaggagggcacccaaccacaagcccccaccacccacagccaaaaaaaaaaagaaacacaaacccaaacgggacaaagcaaacaaaacagagcaccaggaagagaggcgcagagaaagccgaccacgggaagcccaccaaaacagccaccagcgcccccaccaacaagcaccggccggcacggacaccccaaaacccaaaagagagaaaagacacaagagaaaacagcgaaggcaaccacaagacaagacgaaacccaagcgcagaaagcgagcaagcacaaaaccccagagaagaggaccccaccaaccgaaggcaaccccaaacagaaagacgaccaaaaccagcccgagacaaacacgccagaccaaaaaagcaccaaaaaaacacgcaagccacagagaaacaggagcaaaaacgggcacagccaacccccccaaacaaaaccaacaacaacaacaacagcaaacaaacaaacaaagaacaacaacaaagaagccggacagacagcccggcaccaccgcggagccaaacaagaaggcccccgacaccggacaagacaaaacagaccagggcaagaacacgagcagacagcagaaaaggcacagcaaaaaacagagccaaacagcacgacaagcaaaagacaaaagagagaacagcaaaagcaggagaaagaaagacagagaaaaaaaccggaggagcgggaaagagaacagacaagccaagcacacgcaaaagaagagcaccgagacacacccgaggaaagaagaaccaagcccagagggaaaagccccaagggagaaggccagagagcccagcaggaacccgaaagccagacagaccccggaagccgggccccccccccagaaaaggggggcccccggaagaggacaaaacaacagggaacacgggagcaggaacaaccagagaacggaccccagcggaaaacgcagcccagaacaggagaaaagaacaagagccagggagcaagcagcaaacagcaagacaaaggcagaccaagacacaacaaaaaacagcaaggcggcagagaaaaaaacaaaacacacaacaaaaaagacgcagcacggggaaggaaggaaagaccaacagaaacaaagggaacaaaaaaggagcaaaaagaaacaaaaacaaacagaacagggggaggcaaaggcaaaaaacagacaaaacccccaaaaaacggaccccaagcagaggaggacgacacaggaacaaacagagcccacgaagagaaaaaaaagaaagagcaggggaacaaacagcaaaaccacagaagccgggagaaccagcacgacgagacgcacacagggcagcaacaacacggaaggcccaaggagacagcaggagaaggccaacaaaaacgagccaccacggaacagccagaaaagaagccagaccggcagccaggggcacgccagaccagaccagagcagaggacaggagacgagccacgcagagccacccaggagcgggggaaggaaaaagcacccaaaaccagagcacaaacacggaggaggagagcaaacagcggaaaagcgcccccaccgcagaaggcaggcgcaaacggaagcccaagccagggggagagaaacacacacacacaaggccgcagccaggagaggacggaaaccccacgggcagcaagcaaaacagaaggccggacgggaagaggaaaagcgccaggcaggaggcccaggagggcagcccccaaggacaacaaaccccaccagaaggcaaacgacaaccgcaggcaagggaaaacagccaccgacaaagacagacgcggagacagcccaaaagcagacaaaaacacaacagcaaaaaagagacagaccagaaccagaacacacaccgagagacgaacacaaagcacacacaaccacgccaacgcccagaccccaaagaggcacaagcaaaccagcccaagcacggcacaacaggaaaccgcaggcccaacgaacaccacgcgcacaccgaaggacgcccaggcagccgccgcaccaggaggcaggaaacagacacagaggggaggagaagacggcaaggaaccaggcagagaaaaaggaacaaccaaaaaacacccacaaaacggaagacgaggacagacagaagacccagaaaaacaagaaaacaagaaaacccaaacaaaaaagaaagggagacgaaagcccaaggccagagagccaggagcggaccgagagacggaacccaagagggaggccgaaggggaagcacacgcgagaggccacagggagcgccgggaccccccgccggccgccagcgacgagcccgccaaccgggcacccaaccaccacaacccaaaagcaaaaccagaacaaaacaagccccaagcaccacaggagcacaaggaggaaagaaaaaaaaacaagaaaagaaaacacaaaaagcccaaaagacaaggggaaagacagaaacagaacgagaaaaaaaaaaagaaaagacgccggcgaaagagaacaaaaacaaaaaaagcccaagaaaacaaaagaacaggcaaaacaagcacacaggaagccgcgggaaaaccaacccaccagcccaacagagagaaggccacccacagaaaaaacaagcccaacacaaggcgagacgaacagcgcaaaagaaccacgaagcccacgggaaaagaggagccagaaaacaaccacagacaaaaacgaccaccacggacaagaaagggcgaaaaacagaacagagaaagaaagaagaggggccacaacagggcgaagagaagcgaagagagacaggacagcaccgagcacaccggagccacacaagaggaggcccggccccaaaacaacccaacaccaacgaagcccccaccccccaacccgcacccccccacaccccaccacccagaaaaggggaggcccccaggaacaacaaccggaacacggggaggacaggaacacccacgaagcacacaaggcacccagagggagagggcccaaaggcaggcaacagagcagaaaggccccgccccccccccgcgaggacccacacaagaccaagcacacagcgacaagaaagagaggggggccagccaagcgcccgggggcagccggcaccacagggccagaacacgaggcgggaccgacccccgacccacaacccccccccccgcaggacccccaagcgcccaagagcgcaggcgaacgcccgagcacgggccgaccgagagagaagcaccgggcccagaggcaccagaccaggcaaacaggcaggaggaagcacacagcaaggacacaacaccacaagcacaaggagcagcaggcccaggcgggaaaagaaaacaacccggaaaagaaacaaccccgagcgcacagagaacacaccaagacacacccgagcacaccacgaaacgacccaggaaaaaccagcaccacccgccaagcccacaaaaaaaaccccacaaaaagagaacccacaacagcgacccccaccccaggaacccacccccagccgcccacccccccaacggaccaccacacccaaggaaacaaacaggccaagggaaaaaaaaacacaaaaaaaaacaaaaagaacaccagaagaaggcagaaaaaggcaaaggaaaagaacccaagaaaagcacaaagaccagagagcagagacacaccaccacaccaagaacccaaagaaacaccgacggaagccaaagaaccaaaggacagagaaaagaagagaaaaaagaaaaaagaaccacacaagaaaggaaaaaagaaggagaagaaaaagaaggagaaggaggaggaggagaaggaggaggaggaggaggaggaggaggaggaggagaaggagaaggagaaggagaaggagaaggagaaggagaaggagaaggaggagaagaaggagaaggaggaggaggaggaggaggagaagaagaagaagaagaagaagaagaagaagaagaagaagaagaagaagaagaagaagaagaagaagaagaagaagaagaagaagaagcagcccgagaaacacaagcaggaagagaagacgaagaggggcgcacgaaccagacaaaaggcccaggaacacagaaaggccaaccagcccagaggaagagcacgaagcaagaagaacaagaaagcaaaacaagggagcaaaacagggggaacagagaggcaggcaggagaagggagagcgcaaggcccaaaagcagcagagggaaacaaagcgcgagaagaacaaaaagaagacaagagcagagagcaagggggagggaacagcgacagagggcagaaagccacaaaagaaaagccggagcgcagcacagaaggagagaggagcagcacacacgacacaagaccgcaaaacaaggcgaacaaaaaaaaaaaagggcagagaagagagcggggaagagcaaggggagggcgaagcccaggaaaggacgagggcaacaccacacccaacaccaggaagggaagcggaagagcagagccagcagagcaccacaaacacacaagcacaacccaacgggaacagagacagccaaaaggaaacaacggcagcaaaacagaaagcaaaaccaaaccacacagccccgaaaccacacaaaagacccaggccccaaaaccggcgcgcgccaagggaaacacagacgccgcaggccagaagagggcaccagaccaaagaggggagccaccggggcgggaagaacaaggaccggaacagcagcaggccgaacccgagccaccccagaaccaccccccccaagcgcccgacaccaaccacccagacacccagcagcaaccaaaacacccgccaacccgcgcgacgcagaccgcccgccgccaggaccacccgacaaagacaaccccccagaaaacgcaaccccaccagccgagacccagagacccccagcgacaaccggaccaaagacaacaaagccccccaccaaaaacagacgaaaaaaaaacggaggaggaagagaagcggacacagggaacacgggcaccacaagacggaggggagacagacgcaggaaacaaaaggcagcaaaagagcaaaaaagaaagaaaaagagaaaaaaagagaagaaaaaacaaaagaggaggggcaagcaccgccaccaaacaggcaagacccacaagagcagaaccagagggaccaaaaaaacaaagaggaagggagagaagcaggaaacaaggaaagaaacaggagaagaaagagggaagaaacgagagaaggcagggcggcagagcgaagagcacgagaggcagagagggaagggccacacaaggccagacgagcaggcagcagggagagaggaaccgaaaaccgacaagacaaacgagaaaagcagaaagagcagaaaagaaaggaagagggcggcaaaacgagggcacaagcaaacaagggaaaggcagcaaaacaaaaaaacgaacaacaaaaaagaaaaagaagaaaaagacaagaagaagacaccgagaaaaggaaaggcaaacacaacaaagaccagccccaaaccccacaaccccaaggccagccacaaaaggaacaaacccaaagcccaacagaacccgaaccgagaagaaccgcacacaggcgcccgccaacaggaaaagaagcaagacaaagccaagaaaaacccaggggcgaacccccgggcaccaggccccccacagcgcaggccagcccgaaccggaccccagcgggggaacgcaagagaacaaaaaagcccacacacgacagaacaccgaaagaaaccaaagcaccgaagacaggaagagagaaaagaaagaagaagcacgcgaagacaagagggcagcgggacgagacagagaaaaacgagcgagcgagagaccgacaggaagcagcccaaacacggaaccaggagccggcagggggggcaccaccacccgcagggaccagggcaaagcaacgacccggacaccaggcacacacaaaacggcagcagaaagaccagagagaggcgaaggaccaaaccaccaccccgggaaggaaagcaggcagccacgaaagccaaagaagcaagagaaaaagcagaagaaacccacagccaaaaaggcagacaccggcacaaccagaaagaaagggagagagaacaggcaacaagccaaaaaccacaaaacagagcacacacacagcaagcaaaagcaaacaaaaagcccaacaacgcagaaaagagcagggaaggagcaacagcaacacaacgcagaaaagaacagaggagaaagacagagcaacagggcagaaaccaagccaaacaacaccagaaagagcgcaccaagaaaaacagcacccgggaaaaaaagaaaaacaagacagccgaaccaagaaaaagaaaaaaacgggcagcacagacagacggaagcaacagaccaaagcaaaaagaaagcacaaaagggagggacaagggcgaaaaagaagggagaaaccaaaacgcagaaccagaggggaaaggacaagaaacaaaaagagcacagaacaggaaacgaagggcccaaacaaaaagacaaaccaaacacgcccccccggcagaggaggacacaaagaaaaggaccccacacaaccacaaaacaccaccccccaacccaccagaagccccaccccccacacccaaccacagcccccccaacaaacaaacaggacaagacacaaaagcaaaaaaaaaagacaaagaaaaacaaacaaaacagagaggaagaacaacaacaaccaaaaaaaaaaacaaaaaacaaaaaacaacaacaaaaaaaaaaaaccaaacacgcagaaggcgagaggaccgacacaagggaccaaaccccaaaaaagacggcaccaaacgcgaccccacaaaagaaggacgagagccagcagaacagaaaaaaaacacacgacgcacccaaggaaaagggacacaggaggagaaaccagcccaagagaaaacagaccgaagaagagaaaaaacagaagaaacaagacagaaaacaaaaagcccaagaagaacccaaaccccaaacccaccagcaacaagcccaaaacccgaagaaaacacccaaacaaacgcgcaacagaaagagacgcgaggaaggcaccccacaaagaaggaaaaaagcaggaacaaagcaagggacaggagcaaacaaagccaagagggaaaagcccagccagaggaaaaaggcaaacagaagccaaaaacgaagaaaaacaaaaagaaaaaaaaaagaacaaaaagaaaacacacagagcaagcaaacaacagcaacaaaacgggcgccaaacagacacgacaaagagccggcagcaaaaagcaaaaaaagaaagcgaaagccaagcaagagaggaaaacaaccacccagacaaagcagagcgagagaaccacaggagcagagaaaccaaccacaaggggcgggggaggggacagaaagggaccagccaaaaggaaaacaagccaaaaaaacgagcgacacaaaagaaaacaacaacaagcacgacaaagacaaaaccacgaggcggggagggccaaggacaagaacacacagaaccaaggcaaagaagcaaaaagaagcccaagggaaagggccagaaccaaaacggaagagagaggcaagccagaacacaagcacaccaaagccaaaacacagcgcaacccccaagaagcaacccccggccaaggcagggaggaaagaagcaacccccggccaaggcagggaggacaagcccgccacgcaacccccacagccgcgccaccagacaccgcgcgccacgaaagcaccagaacaggggcgagcgagagcagcgaacaaacacaacaagacaaaagccaagagagcacagcacggggccagaaagaaaagagaccgggaggggaacacccccaaaaaaacaaggcagcaaagggaaacaagcacaaccaaaggagcgagaggacaggacccagaaggcggaggaaagaaaagagggggccgagagggccaaagaacaccgaaagaaaagggcacaaagggacaagaacaccaggcacgcgcaggcagacaggcacggacagcaaacaacagcggagaaggcgagagcccaggggcagagaacagaaggacacccggcacacggacaaaccgagggggagcaggagggcccccaagaggacaaaaacaaaaccaggcgacaccaagcacaaccagaaaaagcgcgaaaccaagaaaccccaaccaaagacaggagcgcgcaaccaacaagagaaaaacaccagaaaaaggaggcgcgagagacagaagaggagaagagcacaaaaaaaaagccaccagccaaaccaaacggcaccaaaagcacacaggacaccaggcggcacaggaccaggagacaaagcccgacacccgaagagcgaacaccacaacgcgaaacacgaccaccccgacccaaaaaaccaacgaaaggaaacaaacgaagaaaaaccaacaaaacaaaaggaaaggacaggagcccaagagggaagcacaggcggggaagagagcagaagcgaggcaaggccacgcaggcagcaggggagagacaaagcgcggcagccgccccgcagccagaccccagcaccaaaggcgccccaacaagagaaacccaccagaaccagaaagccacagaccgcacccggagccacccaaagcagacagagcaagcaaaaggccaagggaacgccccaccgaaggcaggcacgggggcagaaaggcaggaacagagacccgaggagaggaccaaggcaggagccccaaaagaaagcaaggagaggaggcaaagcccaaagacagagacacaaaagccgcccaaaccaaccccacgacaagacaacccgaaggaggaagagggcaacccaccgccaagaagcaaaggacgaggaaaagaggcaaaagcaccgggaagaaacccgaaaagcaaggagcaggcccccacacacccgcaaaccgaaccccaacccacaaacgacggagaacacaaccaaccaaacaagaccagaagacaaaaacagaaagccagggcgagggagacaggagaagcgaaaagaaccggggccgggaccaaaaggagccaggccaaaacacaggaaagacagcgagccagccgagaccacccccagcggaaagaaagggggagacaaaaagaaacaacaacaagccagaaggaggaacaggacgaaagcgaagaaggagcgagacaggacaggacgaaaaaccaaagcacaagggcaccaagaaagccccagaggagaacgaacgcacgaacacagagaagcggaaaacagagcaaaaacccaaaacgccaaacacccgaccccccacaaagcgaacaagaaacagacccaggcccgcacaaaaacgaaagacagaaaaagcagaaaaaggacagcaagagaaggcgaaagaaacgaaagcccaggcaaagaaaaaccacaacagcaaagccacagcggcacacagaaaaacaaaacaaagaacaaaaccagggcaaaagacagaagcaagaggccacaccccccaccagccaggaggcgccccaaccacagcacagggcccccagccggcaggccccacccaacagacaagaccacacacaagagacccaggaaaacagacaggggcacaagccccacaggccaagggcccccccccagagccaaaaagcgccgcacaaccagcggagccagaggccccccaggaccggggggagcccggggagccggggggcggggcgaagcccagaggaaacaggaagagaaagaggaagccagaggacaccaggccggagaggaagcgaaaagacaaagagcagaagcaaaaaaaggacagaggaaaccccaaagggaaaggcaaacaggcaaagcaggacgaaagcggaagagcaggggaagaggccagacagcccgagccgaggggccccaagggaacaaacccagaccccggagcaaccgggagcacacgacaacgaacagagcacaggagaagcagggaaaagaggcgacagaaagaaagggaaaacaagagacaacgaggcaccacaacacaagacgaggggacaggccaaaaaaaacaacaaaaacaaacagaaaaaacacaagccagacgacacgaccacggagagacacaagcaagaaggacaccaaagagaaacagagcccccagaagcaaacaacaaacaaaacacaacaacagaagaggagacaaagggccaaagcacacggccaaggagacgaaggggaaaggagcaaggcaggccgccacacacaggggcccggaaggaacgggcaggaaaggaacacccagaaaaagaggcgaagaagacgaagcacccaagcacgagagaccgagcacccaagaaaaagagggaaaaggggaaaaagcaccacgaaaaaaaaccaacaacaagcccggcagccggagacagaccaccagcaaccaagaagaaaacaccggcaaaccagcaaaaccccgaccacacaaaaaaacccacagggaagaagcacaaaaagacacaggcaaagcgcaacaaggagagagaccggcagggccaaacacaagggacaagcgagacaaacagcccagaacagggaacaaacccaggaggcaagacgaggagaagcaagcacaggaaagaaaagagccaggagagggaagaccacaaaggggaggaagcccgaaagcaggggaaacaccgggagaacacagaagagagaaagccggaagaggagggagagaggaaggagaggagagagaggacccccacaggggggggagagccgcaaagagagcgcgggaaagggggaccgggcgaacagcaacaggagcacggcagcccacaaggcgaaaaaaagcgacacaaaaccaaagcaaaacaaacccccaaaaacaagaaagcaaagaaaaaaagcaaggccgcccgaaaacagagccaccacagcaaagaaaaaaaaggaaagaaaaaggagggcaggaaagaaaaagaggcagaaaggagacacacggacccgcaaggcgagccagcccagaagaaaagacacaccccagggagaaagagcacaggcgggggaggggagaaacagaaaagaggggaggccacggggcaaagcacaacaagccagccccacgggaaacggaaggagggaagcagcggacgaaagggagcgggaacagcagcaaaaaaaacgaaaaaacaggaaggagacaaagaaagagcacaggaggcacgaaagcaaacgccgaaagagacaaagaccgcaagcggcgcaaccacacagccaaaagaccaacaagcaccgacagagaacacaaagaaacgcacaggcagccaggcgaaaggcaagggcagaaaccaaagcacaagaagcgaaagccacgacagcaggggcaacagcagcaagaggcaccaagcacaggaccaaaacagagaggaacaaagaaaagagcgcaagaacccaaagagcaagcagcaggaccagaggacgcccacaaaccggacacacgcagggaacggccacaccaaaggagacaccaccaaagacacaaaaaagcccacaggggaggcccgcaagcccggggcaaagagacagagcagcaacaccacaaagagaacgggaacccagaaaacaagccaacagagaagaaaggggcaagaggccaaagaaccacgaaaaggacagggcaagcgaaaacgagacgaacagacgcgcccagagaccacccaagccaggccaaaaacaaacaggaacaaagaaaaaacccaagcccggagcgcagagacaaggaagcacaacccgcagagaaagccgcgggaaggcaggcaagggagggggaaccgcacagcgagagacacagcagccgaggggaagggagggggcaggagagccaacgcgcaaacagagcaagaagcagggagaggaagacagaaccgccccgccccccccaaagccaagcccaggaaggccacccgagcaacacacaccccagcaaccccagaaacaccccagaaaaccaaaagggccgagccgaggggggaccaacaacaaaaagcaaagaaacacagacagagaccgaagaaaacagaaagcagcccccagacagaaaaggcccgagaaggacaaagggacacgaaaacaaggaaggagacacaggaaagagcacagcagaaccaagacccagcaccaacagagaacaaaaccaccaaccccagccagaggacccagccccgcaggcaccaggaacacacgggcacagacaacagaagagaacgaaaacaaaagaaaaaaaaaaaaaaaaaaacaaaaccacaacaaaaaaaacaagaaggcaacacaaggaaaggaggcgccgggaaacgacgccgacccgcaacaccaaagacagggaaacggaaaagaaggcaaagaaaaaaaagacagcgaacacaaaacgaaaccaagacgcaacacagaagaaaagaccgaaaaacaaaaacagaaaaaaaaacaacacaaacaaacaaaggagaaacaagcagcacagcacaacaaacacaaacaagagaaaaggaacaaaagaaaaccagacaggcaccaaacagaccgacagcaaaagaagaccggagcaaaaagccacaaaaaacccccaaggaaaagagaaaacacaccgaaaccccagaaggaggaagaggaagaaggccaaaaaaggacaaacgcaagcaaaagaagcgccgaacagcaaagcacacaaacaaggaaacaacacaaaaaagagaaccgaacgaaacacacaaagacccaaccaaaaaaagagaaccaaaccagcacagaaaccaaaaaaaaaaaaaaaaaacacaaaaaaaacgcaaacaaacaagaacacacaaaaacacagcacagacaagaggcacccagggagcaggggggcaaacggaaaaccacaaccaaccacgcaagcaaacaaagaaaaaagcacagaccaccaagagcgaaaaagacgacaaaaccaacaccaccagaaaagcggagagacaggaacagacacaacaaacaaaaaaacaaaaacagcaaaccaacagccaaaaaaaaaaagaagagaaacgaagcaaccaacaacacagggacaaaacagcccccacgcaaagacggaaaaagcagagcaaagacaacaaaaggagacaaggagaacaaggggaaggaagaagcaaggacacagggagaaaaagaaaaaagcaaccccaaacaccagacaaccgaaaacaaccagaaaagagcggaaaaaaaaccagaaagagcccagcaaagccaaaagcgagaaagaaaagggaaaaacacccacaaagccaaaaaaaaaaacgcgcaaagaaacaagcaagagaaagacagacaagaaccaaaccaaaaaaaagaaaagaagaaaaggaaaaaccccagccagaaggggacaacaaggaaaaggcacaccaaaagcaacacagacaagaaacccacaaaacaaaaaacacagcaggggaaagaaaaaaaaaaacaaaaaacaaaaaacaaaacaaaacaaaaaaaaccaaaaaaacaaaaacaaaacaaacaaacaaaaaacccagaaagccaaaacaagacaacaaaaaagaacgggggaaaaccacccgaccaaacgacacagagcaagaagaaaaaacgcagcgcaggggaagaggcaacaaaggaagaagaagacaagaaaaacccacaagcaagacagagacaaagaagaaaaaaacaaaaagaaaaagagaaaacaccaacaaagggcagccaacggggcgcagagaagaaagcaaagaccaaacacccgacaacaccaagcagggacaaggaccaccacaaaaaccagacacacgaacaacaaaagaaaaggggaaagagccaaacacaggcacaggggaaagcccaaagaacccaaggccaggccaagacaaaaggcaaacgaaaaccaaagcaaaggacacgcaaagaacaaaacagcaacacagagagaaaagaccacaacccacacgaagaaggcaacaccaaaagcaaagaaccaagaagagacccaaaaaaaaaaaaaaaaaagcaagaaacaggggaagagcaagcagagaaccaaagaagaccgaaggcgagaagcacaaaaaagcaccacaagcaccagggaaacaaagaaaagacccgagacaccaaccaacgaaggcaaagacaaaaaccaagcacagcacagcggcaaggaggggagaaagaggaagcaccccacggaggagcaaacggacaaacaccagaaaaacgggacccaagaaaagaaacagggacacgaagacccagcaagcacccgggcaaaccaaagagcccaccaaccacaggaccggccacaagcaagagccaaaaaccagaaacggaaacaaccagaaccccaaccaaagaaggaacagaaaagagcaacacaaggaacccacagcaaaaaagaggacaagaccgcgggcaaaggaggaacagaaagacaccaaggaggcaaccagaaccaaaaggcagcaacaaccacgaaaggaagccaaagcaaaaaccaagaacaaccaagacaaagaagaaaagaaagaaggcccaaggaggaggcaaccccacaaaggagaacaaaaaacaggggaggcagagggaccgggggagaggagagagggagggaaaggggacaggacaggaggggagagggagaaaaagaagcacagagaacccccagcacagcgccccccacaggccaccgacacaaacaacccgcagacgcgcaggagggggggcaagagcaacggggccagacccaagcggccgagcccagaaaaaagggcgaaccggcacagagaacccaacacacaagggaaacgccaacaaaacaaggcaaacgagggaacagaagaagggaggagggaagcaggaagaagggggagggaaacaaagagggaagggagcaccggcagccacagccagcaagccaccacagccagagagacccaagagagagggcagaaagcaaaaggacaacacgaggacagcacaccaccaaaaaggacaagacccagaagaaggacaagacaaccaagacaagcacgagggcaagaaacgcaaaaagaaccagaaaaaggaaaccacaagggcccagaccagccaacgacccagggacaccccaccccccccgcagcacccgaccccggacacaacacgacgcagacacagaaacgagcaacaaggccgaggacgccccacggggagcgaaacggacaccccagaaacccggagaacaaaaagagacagggacacggaggggagacaaggaaccagaaaaaagcagcaagaacacagagagccgccgcccaaaagggggaaagcagagcagacgacaggggaggaagcaaaagagcagagagagaggggcaagagaccacaccagcaaccagcagcgacggacccagagggcccaacaagagcagcggaaggggagccccacacaagcaagcgccaggagccaaagaaaccacaaacacacccagcgcccaacagagaagccccccacccacaaaagggaaccggcagagccgggggagcgaggagcggggcaagcaagaggccaccgccggcggggccacaagaagagagacaaagaagggaacgcgacacgaggcgacacagcaagaggaaaggagacaagcccaagaggcagaaaacacgacacaggacccaccaggagaaagccagcgggcaccgaccagggacacggaagaagggaaacaaaaaaagccccccgggcaggcccccccaccacccaggaaaaaccagcggacccaaagacaagcgacaaaaaagcagagacccacaccagccccaccaaaaaaaaagcgagggggaagaaaagaacagaaaaacagccagagccaagaagcgcccaccaaaaaaagcccagcacaggaggcaaaaacgccaagccaaggaagaaggcgagccccacaacaacccggggcgcgcgggcgacgccaccagagaaaggaacaccaaagaaacacccaaagagaacaaggcgcaagcagaggaagcagggcgcccgcccagaaacaaagaagcgcgcgaggggcgggccccccaggcgacgggccagccacccaaaagagcaaggcgcggcagcgcaagagaagccagggagggaaaggaaaagagcggacccggaaagacacaagagaaaagaaggaaaaaaaaaaaaaagaaaaagagaaaacaggaaacaggcagcaccaagagccagaggccaaaggcaggaagcagacgaggcccagagccccggcggcagcgggggcgggagaggcagaacaccaccaaccccccccgagacagggggaaacggacacaccccgagaggagaaagacacccgcccgcggacggcccccacaagcacaaccaaccaagccccaccaagagcaagcagaggggcaggcgcaaaccccacaggcccggcacaccagacagcaggaaaaacacaaccgagacaaccccccaacaccacagcgggggaccagaaagagaacacgccgcacgcagagaacacacaagccagacagagcccaaagcaaaacccgcaaaagaaacaggaaaacgccgaacaaaaacggaaaagaaaagcaacaaaaaaaaaacccgaaacaccacagaaggggagaaaaaacaacaaaggaacaggaaggcaacaaaaagcagaaagggggggagcaaaagagccaacaagggcaggaaacgagacacaaaaacaggagaagaaaaacaacagacaaaccaacacaccacgaaagggggcaccaagaaaaaagggaacggcaaccgacaggcgacccaggagccacgcaaaaaaaaaacagagaccaggaaaacacccaccaggaggaaagggggcaagacacagaaaaggaagcagccgagccaagaggaaaggggaggaaaggagggacaaagaaggggagagggaggaggaaagagacagaagaggaaaaaagaaaggaaagaagcaccagccgcccagaggaagcaggccgacaggacggcacgagaagaaggaacaggggcccccagcaaggggggcacgggggccaggcgggaccccgccaaccccacgaaaaaaagagcagaacaaacgcaaaggcaaggagaagaaagagacagaaccccagcgccccgagagagcaacacaggaggaaaggaaagaccacacaacagaaacaagaagaacacaagaagaacaaaggggcaagaaaccccaacccgaaccaccccgaaacagacggggggggggggggggggggggggaagaccagcaagcagaaccccacggaaacagaaccccgggaggagacggaaaaaagggagccggagagcgaaagaaggaggcaggagagacaaggcagaccaaaacaaaacggagaaaagaaggacggagaacaaaagaacaaaccgccaggggcaggacaaggacaggagcaccaaaggagagggcccaacacacaaccaggagaaagaaaacgccaggagcaagcccagaagaagaaaaagcagaaaaaggggagcggaacagaaccaacagcagccgaagcaagcaggaaaaccccgaggagaccccagcagaaccaaagagaacagaaacccagacgggagcagagcacgaaccaagagggggagaagcagggagcagaaaacccgacgcgccagcaccaagcagagcagaggcagggcagagagaagggcacgaaacagaccaacaccacagcgcagcacgcccggcaccccagcaccaaggcccagcaacagggccgcgaacccacaaaaagagagaggaggcaaaaaagacaacaaaaagagagacagacagacagagaaaagcacgaagaaaaacgaaaaaaacaaaagagaaccagaagaccagaggcaggaccaaaacaccaaggagggaacaaagcaaacagaagaaaagagagacacagggggcaccaaaggaggcagggaaggcaaggagaaaggagaaaggcaaaaagggagcgcgcgagacagaaaaaacacgaaaggagcagaaccacagcaaaacaacggaacaaaagacaaaggagagaaaaccacacaaagcaaaaaaggggggagaaaggaaacaagggcagaacacaacaaaaacagacaaagaaacaaagagcacgaaaaaaaaaaaaaacaacaaaaggcaagcaaaccacgcccaggcacccagcggccggaccacagaggaagaagaagcagacaccgcgggggccgagaacaggagaacacgaaaaccaggggcagccaccaggcaggccggaacagacaaaacacagaacagcagagggcagaggaccagcgaacccagaggaagaggaccagggagaggcccagggaagccacaagggggcaaagaaacacgaaagaaggccagcacccagccacggaagaaccacgagagaaccagcagaggagcaaccgaaacaagcaccgcaacagaagacaccaccaccagcggaggaaagcccaccccagcagagaggacagccacccagaggaggaaggcagccaacaagccccaaccaggggggggcacaggcagcagaccagcaaacggaaaagaacaaacgaaaagggcagcagaccgcccggggacacaccagagccacagcgcaacacacaagagagaccagaacgggaagacagacaggaaaggaaagacccaaggggagacagccagcgccacggaaaaaaaaaaacagaagaaaggaacaaagcaaggaaagccagcaaaacccagccagagaggccaggaggcgggggaaagaagcggagacgcagcaacaaagggcaaacacagaagaaggagggaagaaggaaccagacggaaaagaagacgggggagaccaggcgccccccgcggaacgaccacaccaagcacccgaaaaaggaaaggacaaaacaggggcaaccgcaacccagaacaggaagcgcaaaaagagaccaacggaacaagaaagaacaacgaccgagcaagcacaggaaaagacgggccacacccgagcagaaagagcaagaaaaggaacaggagacagaaaaacaaagaagaaaccaagggcggggaaaaaagagaagacaggaggagcgagcaaacaaagggaggagaaaacaagaggccacaaggaagaaggcagaagggacgggcagaagaaaagggaagaggagaaagggaacacgcccgcccgcccagaggccccaccagacgagcggccaaagacgggacaagcgcagccagcccggaggagaacaaacgaaaggaagaaacacgaaacggaaagacaggacgagcgaaaagccggaaaacagcaccggaggagggagcagggagccgagcagcaggaacaggggaagcgagagagcaggagaggccgcacagaaggaagaaagcacacaaagaggaaaggaggagcccaagaaaagcgagaggagagaagcggagccagcaccagcaggagacacagagagaacaccgagagggagaagcccaggagcacaaggcagcacacaaagcagcaccagaacccccccacaaaacaaaacacccacaccggaacccggcccccgccaaagccaccaaaagggggaaggcgccaaggcacaagcaagggacaaagaccaaagagccaagcgagagcaccgacaaaacccaaggagcggcagaacgcaaggaagaagacaaccccggaaacagaagaaaaccaacagcagagcaaggggcaaaaaacacagacgcccaccaggcaccaacgacccaacacgcaacacacaaagagagcccaaacaggcaacaacgaaacaagggaaacaaacaagacaagagaaagcgacggccagaagagaacggcaagaaaggaacaccaggcagccaacggcgcgaaaaaaaacccagacagaaaaaagaacacacagaaaagcacgaaacaaaaacaaagcaccaggcccccaagcagacccggaacagcaccaacagggaccgggagggccacagacaacaagcagcggaccaagcccagccgagaaaagagagcaaggacagcgggcgaacccgaaaagaagcagacccggaggcacagaaaccgaaacgcaaaccccaaacgcaacgcagcacgcccggcagccgcgagcaccaagacagcgccccggggaaagagcccggaaaggcaagcccacccaccaggggcacaagagacgagcagaaagccgagaccaaaaaacaggcccaccaagcccaaacacgaaggagaaaaggcgaagaaacaaaggggggggggggggggggggggaggaaggcaagcacaaccgggcccgggcagcaagccaaccaaccaacgggcccaccacgcagcagccacagacacaggccaggcaaggggggccaggagccagcagggacacagagaggcccaggggaacgggccgcaaaaccaaacccagcaccgagaaaaacaagacaagaggggaggccgaaacgcacaggcagcagggccgaagccagggcccaccccaccacacacacacacacacacacacacacacacacacacacacaggggggagacagggccgaagccgaagccggaaccacgagaccaggcggccgaaccagaaaccgccgcccgcccccaaggcgggaaaaggcgagccaccacacccagccacaaacacacaaaagggcgggagaacaagcccaggacaaggcagcaccagccagcccccagccaagcaaaccgaaacagagggccccgcggcagccaaaaggggggggggggcacagccacaggccacaccacggcgcacacagaagaggacagaaagggggaaaaagagagcaaagagaaaaaaaacaggacaagcacaacacacaagaacaacaacccacacaaaacagccggcgaacccacaaaagcccaacgccacaccagaagccaacaccccaaagcgggcgccgcagcgccaacaacccacagcaccaacagacgaagggaaaaaaaccaggcgcaacagccggcgacaagggcggcgaggggaagccggagccaagggaacacagcccacaggcgccccgccgcacagacagccgaacaccccaggccggagccagcccgagccgcaggggcagccgccgcacgccacgagagagaacaaagcacaagcacaccccccacaaaccagaaaaccccgcacccgcccacgcaccggccagagcccaaaccaacaggaaggaagaaaaagagaaagagaagaagaggagcacggaggcgcacgcacaggcggagaaaccagaaggaagaagaaaaacaggaacaagaagcgagagaccaggacccaggagacaaaagaacaaaaaaagcaagggagacaaagagcaacaaaacacaccgaaccagaacggaagagagagacacccccacgcccccccaccccccccccccccgcgccccccccccgcaggaggccaggcaaacccaaggacgaagacgcgagagaagcagcagcaggaagagaaaagagacagaggggaggacagaaacaacgaaagcaggaccagagcagaagcacgcacaaggagagaaacaacccgcaagaagaaaacaagcacccaggaaggcggcccgcagggcccacgaagcacgaaaaagggacccaacggacaccgcagagagcaggagcacccccacccagcagagaacaacaagccagaccggaaaagccaaagggaaagagacagcaaggagggagggggagcaggccacaaacagaaacagggaacccacgaaaaaaggaaagacgacgcgggaaaaagaggccccagggaacccaaccacaaaagaaaggacacccagccaaaaaagaaccagaaccccgcaaaaggaacgcagggacaaagagggagcagagacgaaggaaaggccaccaagacgcccaaccggggaccacccagcagacaccaaacccaaacacagcgagccaagaagcacgggacaggagccgcaagcgacccgagaggccgccagagccgcccaaagggagaagacgcgaaccaacaaggggggacccaaggaaagcagagcaaggacgaaggagcgaagggggcaaccccaaggagaacaacaaacaaccaaccagaccccccgccaacccgagccagggaaaacaccaaccaaagagacacaggaggaacccaggcccagccccgagagcagaggaggcgcgagcacaacaggagaagaggcccggcgggaaggccaagccccaggaggggaagcaagggaggggaggcaggagggggaggggggggggggaggggggagaacagcccaagaagcagggggaggggcaaaggaaggaggcagagggggaaacgggaaagaggaaacagaaagaaaaaaaaaaacaaaaaaaaaagaacaacaaacaaccaacagaacacccaaaacccagggacaaaccaccaaccaaacaaacacagggaagaacaggcccagcggaagaacagagggccagcggacaggggaggggaaccccggccgggaggccaaggaccagaaaaggaagcaggggagagggggaagaagggggggagaacaccccaagaggcagaggaggaggagaggaaggggggggagggaaaacgggaagcaggaaacagaaagaaaaaaaaaaaacaagacaaaaaaaagaaaaaaagaaaagggcaggaaaggacaaaagagaaaggggaccgacaaaagaaaaaagagaaggagagagcagccaagcgccaagaacaaggaagagcacaggaagaaggccgccgggcccaggcagaacgaaagaaagcagagcgcgaccaaaagaggggccacagaaccccaaacagacaccaacagcaagaaacacagcaagaggggaaagaccaaaagaacacaacaaagccaacgcgggacaacacgcgcccggagccaaaaggccggaaagcgacaagaggaacagcagacccaaggaaaccgaagaacgccaggggggcaaaacagacaaaaaaaaaagacacaggacaagcaacaaaacacgggggggacggggaaggccagcggggaggagcccgcaggacagggcccggggacaacagggagaaagaaaaaaaaaaaaaacacaaccaagcgccaaaccagggcccaggccggagggaagaaaaccggaagcaccaacgacagagcgaccaaagagccaaagaaaaacgaagaaaggagcaaaaagaacaggacaaaaaagaaggacaaagacaagaaggcgcccgcgggacagagccgaccgagggcaacacaacagccacagcaagcaaacacacacaaccacaccccagccaagaccgaagaaagcacggaaagcacgaccagcgaacgaagaagaccaaaagggcagagcgaccaacacgcccaaaagaaggagaaaggaagaaaaaaacccggaacaaaacgggaggagcaaaggacagcgcgaaaggagacgaccagacaagaggaaaaaaaggaggcgggaaaaagcaaagggaaaaacaaaaagacaacaacaagaccaggggggggaggaggaaggagcgcgccagaggcgaaggggagggagacgggggaaggaaagcgggaggggaagagcaagaggagaaaaaagaaaaagaacacaaaaaaaaaaccccgccaaaagaagaaagaaaagaaaggaaagaaaccagaacaagaacgggacgagcaaaggcacagggaagggaacaccagggagaaagcaacaaaggcccgagcacccagcacaaacaaccaaagaagacacagaaagagcacagagcaaaacggccacccgacggaaagacaggcagacacccgaacaggcgcacccagcaaggcagaccagaagggcaacacagacgaagacaaagagccagaagaagcaacaccagaggaagagcaaacgccccaagagaaccgcaaggagcaagcgaagcagaacaaagacacagaagagcagcccaaccagagcaagccaaaaaaggcaaaacgccacaccacaagaagaacgcccgaaaacaaacaggacaaggcgcagccggggaaaagaaggagaagaggggaggagaggaagacgaggaagaggaggaggagaaggcgagcaaagacaagaaacacgaagccggaccaggaaagcaggaacagacgcgcaggaccaaagaaaacaaacagagacagagcaggggagagaaaaaaggggaccaagagcccgcaaagcagcagcagcaaaaccccggacgaggagcaaacaggaggaggagggacgaacagaagaagggaacagaaaccaggagacagcagcacccacacccaaacagaagggcccccacaagcccaggcgaaaaagaaggggacagaaagggcgcagcaggagggagccaacacaccggagcagaaacacggaagccgggccccagaccacgaccaggccgaggaaccaagcagcccaaaagacaaagaaccggagagacgggaagcacggaaaccaacccccggaacgaagcgacaccagccacccagccacccgaaaaacaaaaaaacaaaaacaaaacaagcaccccagagcgaggaacacaaaagacgcaccccgaccaagcaccccccgagacaccgaagcccaaacgcacccagacacaggcgcagaagcacggacgcacaccggagccccaaaacccacaggaaccaacccacccaccagccagagaagccaccacaacagagcaccaacgccgccccggggaaccacaccacacagcaacggccggccaccaaagcaccgggaacgaaagacaggagacaaccccaacaggcagcacaagcaacaaaaacaaaagagagaaaagagccaaaaaacccgcgacagcccacacaaccaaggaacaacggacacagagaccggcgacaagaggaaagaagacgaccagagcaacccgggcaaaggagacaaacacgggagaaccacgaagcccaacagagcaagccaaaaggccagagaaaaaaggcgaaggggccaggcagacccccacggaacccaaggggcagggaaggaccccaggggcaagaggagccggaagccgagccaaaaggagggaaggggaaacaggcagggcccggaacaaaacaaagacaggaaacagaaagcaacagggaacccggccaacagcacggggccagcagggagggcagaggagagagggaacccggcggcagagcccacagcaaccaggccccaggggaagaggcaaacagcccaggccagcggaacaaagaccagcaacccgggcaacagaacaccggcagaccacgcaccaagggagaaagggaggagaagaacgagaaagaaagaaaagaaaacagcacgacaagaaacgaaaacaggcaggccacacacaccacgccagaccagccagaacacaaccccgaggcaaagggaagaagcccaccacaggggaaacaaggaggcacaggagaccacaggccaaaaaggggacacccacccaagacggagccccacgaggcgaagccagaacggaccaacgcagacaagaaaacaaacaacaggggcaaacacacagccaggaccaagacagaaaagccagaaggaaaaacaggaggaccgaagcaaagcaaaaaaagccagaaaaaaacaaagcagcaccaaaccacgacaaaccagcaagggcgccaggaaaacccacaagacggcgcagcgggacagccacagcacagaaacaaccgggagacacacaaaagaggcacagccagcccaaacaacaccaagaaggcaggaggaacgacagcccaaagaggccgcaggaaaaaaaaagcggagccccggaaacaacccgggcacccccccgcaggagcaaaaccgcggcccaggacccacccccaacaagaccccacacaaagcggcacaacacaaaggaccccccaggagggaagagaagaaaaacaaagcaggaacccaaggaacggggcaggcgcgaaaagagaaaggaggaaggaccggggcagcaaggaagacagccgcgccgcgaccccagggaggggcggcaggccccaacccaaaaaaccggacaccaaaggggcagagacgagaaccaccaaaaagacagcaagagacagagaaaggacaccccacaacagaaagaagaacccaaaaccaggggcagggcgcccaggagaggacaaagagccaaaagacacagcacccccaagaaacaaccaaagaagaaaaggaccggggacagagggaagcaaagccccgagaccgaagcagaggaaaagagaaaaaggcggggagcaaaaagaaagcaaaaccggaaggaaagcaaccccccgcaggggggaaagaaaggaagcagccaaggacagggaaaacaggagggagaaccaccaaaacaggccgaacagagaagcagaaggaaaacaggacggaaacgcaacgcagacggaagaacaaaggaaacaagcaaccaaacagccaaacacccagagggacaggaagcagcagcgcgaaaggaggagagacagggccagagagcaaaacagaagggcaacagccagagcagcgagcgagcgccccccggccacgccacaccaacagaagaagggagcacacccaacacagaccagaaaagaagagaacaagaaggccccaccaggaacaaaagccaagaaaaacagaaaaaaaaaaaaaaaaaaaaacggaggaaagaaggggagggcacaaaggaagaaacaaaagacagggcagaggaaaagccccaaaaccagaacccaacaaaaagagggcagagcaaaacccagggggcagacaacagggcgaacccaaacaagagaggcaaaagccacagcgcaggcagagaaggcacaagaaaacaaagacaacaaagcgacaagcggaagaaaggaaccagcacgcggacaagaaaaacaggcacgcaggaaaggggcaaaccagaagcagaaacaaagaccacccacagcagccacgagaaaagccacagacccaacacgacaaagaggcaccagcaggacacgaaaacagcagggaaaggaacgccaagcccacagcaggcaaggaaagaaacaaaagaaacgaaagcaggaaaacacaggggcaaaaaaaaaacaaggaaacaggccaaaagaagaaaaagaaccagaccccaagaggccaagcgaaaagaacagaaaaaggggggagggcagaggacaaaagcagaaaggcacagagggcggaaagggaacaaagaaaacaagggagacgagaacacggacagaaaggcaaagagaaaaaggagggcggggggacaagggggagggaggaagcggaggaaagcagagaaggaaggacaaccaaaggagcagaaaaggccaaaggagacggccgagcaaaaaagaagaggccaaaaggggaaagaacgaaaccaccaaaggagccaaaaggaaagcacacaaagaggcaagaaaagacaccagcaacacagcaagagcgaaaggacccgaaagcgccggagacaggccggggcagcaaacacaaagagagccacagcagcaggagaagcacagcgcccccaaggaggagcagagaaagacccaaggagcaaagggaacgcaacccaaggagaacaacaagaacaaccagagcccggagccgaccagcgcaagacaaaagaggccagcggccacacggaaagagaggcccaggcgcaaacaagccccagacaggggaagccagggccaaaaagggaaggggagagggaagggaggggagggaagggggacgggaagcacaaagaagaggaaaaacgaaaaaaaaaaaaaaaaaaagaaagaggaagcagcggagacaacaagcagcaaccaagagaccaaccagccagcagcaccacagcaggaaaggcaagacaaaaccgagagggagaaacacacagagcaggccaggacggaagaaaaaaaaaaaccacaaggagacgcagggaaccgggaaaaaaccaggacaaaagacaaaacgagaggaagaaacaaagacaaaacaaagcaggccagagaccgagagaaaaaccacagaacagaccccaggaaaggaggacccaacccgaagaacaccagagcccggcaagcgaccagaacggcaacccccaaaggaacccgggaccagcgcagccagcagcccgcaacggcacgacacagagccaacaaccaaaccgcgaaaccaggaaacggaaagaagaacagaagaaaacaaagcagaggcaacagcagagggcaacagcagaacacgcagcccagcccaaacccgaccaccacgacgggcccgcaacccccaagacacggcacacacaaacagcaaaccaaccaggcaacaaaaaacaaagaaagacacccaccgccaaagccaaacggaagagcccaaagagggggaaggcggaccccccaacaaagaagaaacgaagaccaggaggcagcaggcagagggaggcagcacaacccggagacaggcccccaagcccgaccaggccgaaaaaagcggccccccaagcccgggccaggagaggcagacagggccagacccacagacacaaaacggagcggaaagggggacgcaaaggccacacgaccaagaagagagaacaacagaaaaccaagcacagaaacgaagagagaggacaaagaaacaggaacacagggaaggcccaggaagacaaccacaagcggagccgcaggcggacccgaaaacaagaaagaaggcacgacaggagaaaagcaaaaagaacaaggaaccgaaggcgccacggaacccacaagaaccagaccaaacaaacagaccagaaaaggagaaaagaacaaaaggaagacagccagcagagcaaaccagcaacgacccagacaggagacacagaaggaacccccacagccaaccaacaaaccggggaagcgagaccaccaagcacaaaagaaaaaaaagaacaaaggaacaacccccgccagccggccacagggcagaaccacccaagaacacacccgcgaagcagaaaacaaacgagaaggagaacagacacgggggcagggaagggcaaggaagccgccaaccaaaaccccaggaaaaccacccagacaggggaccacccgagacagagaagcacagcaacaccgagaaaaaacacgaggaaaaacacccacggggacacgggcaacgacaaaacacagcacaccagaaacacgaaagcaagccacacggaggcagaaacacccgcagcccacacacccagcggccagacagaccgcacgaaaacagacacacccccaaaggcaccacagaggacccaaaaaggagaaaaacgacccccggacacaacagacccaggcacaccacccaggcagagaagcgcggacagccgaaaacaccacaggggacagaaaaaggccaggggaaaagaacgagccgaagacagaacaacccaagacccacggggggaaagaaaggcacacaacaagcgcccgaccccaccagcacaggagaggccccccacaacaacacacaaaaaaacaaaagaagaaagcagcaaaaacaaaaacgaaagaacccacaggaaaacaaaaaaagcaaaaaagcagaaagacagccgggaaagccacgagccccccaaaccacaacccgaaaggcccaaccaaaaacaaaccagacaagcaggccaaaaaaaacgggccggagagggcagcaaaaagaaaaaagaccaaagaacaaaggagcacaccaacacaaaaacagacacagagacacagccaaccccgcccccccgcagaagcccgccaaaccgaagagcagcacagcaccaacacagacggaaggaaagacacacaacagccacaggcaaaagcaagaaaaagaccaggcacagcccaggaaaggaaacgagcagaggggaaaagacagagggccaaccaacgccgaggggaccccaaggaccgaaccaagcacggaaagacgagacaccaagcaaaccacaagacggaaaaggggacccgggaaagagagccaggcagaaaggcacaaaacgacagaaagaaaacagaaacaggaagaaaagaaacaggaaaaggaaaaaaagcagagaaaagaaaaaccaaaaaccgagggggacagaagaaagccgaaggcgaggccagaaccacagaaaaaacaagagacaacacaaacagaagggaaaggccaagacaaagacaaccgaccaagaccgcggggcagagaagaaagggaacacaggaaacggccgaaaggacaaccacgaaaggcaacaaccaaagaagaaaagagaaagagcccagaaaaagaaaaagaaaaggagagcaaggaaagccaggacaaaaaagagcacaggagacccaaccaaacaacacgaacaggggcaaaaaacgacagccagccaagaaaaagacccacacaacaaagaaaaaaaaaaggaaccaacaccaaagccaccaaacgacaggcacaaagagaagaaacggccacacccaaggcagggagaaagaagccagaacggaaaggagggacaacccaacccgccaacccacaagagagggaggacacaacaggacccaggaaggacgcagccaggcggaaagcaccagaaaaaaaacagagagacaaaaagcccaaggaggagagccccgcaccaagcaaagagcggaaccaggaaaaaaaggaaacccaggcaagaccacgggcacacacagaggaggagaggggcaaacaagcaacaccccaaacagaacgaaccggaagcaaaaaaaaagagcaaacaacaagcaaaaaacggaagggagcccagcgaaccaagcacagaaagaagcaaaaaagaggagcaagccaaccggacgacagcaagacaagcaaaaaaagcaacaaaaggaaaaaaaacagaacaaagacccaaacaaaaaaaaacgcaagagcccccccccgccccacccccccacccaccacccaccccgccccagccccagaaaaggccagaaaaagcaggaacgaccagaaacaaccagccggacaacaaggcagaggacagggcacccagggaagaaaagcgcccagaggggaaagggaccaaggggcaacagagcagagacagccccggccgaaggagcccacaggaaaaccaagcgcacaagacaagcagagggcaaagccacccagcagcccggaggagccaagggccccagggcccccgaaggaggacagggcgaccggccccaaccggccacaccacagaaccacaagcgccaaaggacggagccaacgccacaggcggaaaaaccagagacagagccaggccgcggaagaagcagaagcaaaaagcagggggaaccccagggcaggccaggcggcagcagggaaacacccaaggcaacaccccgcaacacgagggagaaccggggcaaggaggcaggcgggcccaggccccagaaagccggaaagaagaggccacaagccaagccccccagggaagcagcaagacccccaagaccgggaacaccaggccagccaccaagaagccccccccagacagccgccccccccccccccccccccccccaacccccccacgccaccgacccccgccccccccccacccaccaccaacaagacccaaagaaagcaggaaacaaacaagcagagaaaaagcaacagacaaccagaaggcaaacaagaaaaaagaagaagacccagaaagaacccacacaccaggccacgaccgacaagggagcaaaaccaccagggaagaaagacagcacaaaaagggcggcacaacggggacagagaagaaggaacgaccacccacccgacaaggcaaacaagggaccaaggaaccacaaaaaccagagacacgaaacaagaggagaaagggggaaaagcccgaagaagggcacaggggaaaaaccgaaagaacagcaaggggccgaagacgagaagacaaagggacccagaaacgcaaaccgcaaggcaaaagacaccacaaaagacaaaaaggccaccaacagagggaaaggacaccaccaacagaaggggacaaaccaagaaaaagaaccaagaaggggacccagaaaacaaaaaccccaaaaaaaggggccagagcaaacaaagaaccaccgaagaaaccgaaagcgagaaacaccgaaaaaaagcaacaccaacacagagaaagcaaacaaaacaaccgaaccaccacaccggacagaaggcaaggcaaaaacagggacagcagagcggcaggagggagaaagaggaacacccccaggggggagcaagcgacaaccaccggaaagcagcggcggcccagaaaaggacagacaccaaggaccgcaaacacccgggcaaaccagaagagcccaaccggaagaaggacacagcccacagcaagcagccaaaaagccagaagcggaaagaacccagagcccccaacagaggaaggaacaaaaaaagggacaacacaaggagacaccagcaaaaaaggaagaaagaaaccaggcaaaggggaccggagggcacaccgaggaggaacacaacacaaaagaaccaaagaacgaccacgaaagggaaagcccagaaacagaaccagagaaaagaacaagcaaaacacagaaacgaagaagaacgaagaccaaaggggacacgccacacccagaaggaaacaacacccaggaaggagacagagacaaagggagcgagacaaaaggaggaccacagagacgccaaccagggaccacccaaaagccccaaacgagacaccagcaacacagcaaacgcgaaaggacccgaaagcgcccggagacagcggggcagcaaacacaaagggagccacagcagcaggaggacacagggcccacaaggaggagagagaaagacccaaggagcaaagggacgcaacccgagggcaacagcaagaacaaccagaccccggagccgaccagcgcaagacaaaagaggccagggccacacggaaagagagcgagggcacgcaaacaagccccagacaggggaagccagagccaaaaaggggagggggggaggggagggggggagggcaagggggacgggcagcaggaaagaagaggaaaaacgaaaaaaaaaaagaaaaaaaagaaaaaaaagaaaaagcgaggggccccacaaagaaacacagcaagcaaaaagaggcacaacagaacgaaagaggcagaacacaaaaggaaccaaaacagaaaccagaggaagcagacaaagcaacagaggccaaacaagagaacagagcagcaacggcaccgcacagcccggaagaagaccagagcacggcaggcaaaccaagaaacaagcagccaacagcaaagaaagagaagaaacaaaaggccaagcaaagaacagcacagaagacaagacagaacccaaaaccggaaacagggaggcccagcagacggcagaggcagcaacgccaagcagagaaggccccgcggggcaaggcacccacgcgcaaggggacacccgcccaaggaaagaagagcaaaccaggggggacgcgacacccacaagccggcaggcagaccagggagaggcggggaaccacgagaaaacaaacccggcacgaacgaaacaacaccaggaccccacgaaaacaccagcaagccgaaacgaaacaggaagacccgcacagaaggaaacccagaaccacagcacaacagaaacgcgagaaaagaagaacaaccaaccaagccccggagccagaaggaaaaaaaaaaagaaaagagaggaagaacaaaacaagacaaacgaagaaaccgaaaaagcaaagcaagcaaaaacacgaaacaacaaaaagggaggcgcgggaaacagaccaccaaacaggcgaaccgagaaaggaaaccgcccccgaaaggcagacgaaggaaaccccacaggcccaaaacaaaagaagcgaaaaaaagccaaagaggaaggagcggggcggaaacagcacagaaacaacgggaaccgaacccacaagcacaccacccccacagccaccaggcgaaccagagcgccccccccccgccaaccacccccaaccacgcacggcggagcccacacccagggagccagagcccaagacccacaacggcacagccaacgacccccaaccacccccccgcgccgagacaacccagaagggccccgccagaaaacaccccagcacacacaagaaaccagcccaacgcccccccccccccgcccccccccccccccccccccccccccccccccccccccccccccccccccccagacggacaagacaacaaagaccccccaccccccaaaaccccaacccccccccccgcccagagagacccccacccaccaccccccgcccagggcacccccacccgggcagagccccacaggacaaggggccccccccaggagccagaaaggcaaccgcacaaccacggagccagcccccccagcaagcggggggagcccgggggcgggggcgggggagagccccaggcacacaaaccgcaagcccagcacccaacccccaggggccccacagccaaggcgcggcacggccgagcaggccggcacagccccagggaagagcaaccaggcccgcagcaaggccggcacagagaaaggggggcgcagagggaggacccaggggggcagcaggaggcccccagccgcccaccgcccgcaccgacagaaggaacggacaaggaggggggagggccccaggcccaaccaagagccaaccagaaaggccacaggcccacccccaaaggcccaccggaccgcgcccaccgcaaaaaaagccaacaaaaaggcacacgaggagcagagaaagagccaaggagcaaaggaacgcaacccaaggggaacaacaaagaacaaccagaccccagagccgaccagcgcaagacagaagaggccagcggccacagggaaagagaggcccaggcggcaaacacgcccagacaggggaagccagggccaagaagaggaggggggggggggagggggggggacgggaagcaggaaagaaagaaaaaaaccaaaaaaagacaaaaaaaaaaaggcacacaagcagggcccaaaccgcacacccccaaccaaccccgggagccagaaccccggggagggcaccgcacacagacaaccaagccaccccagagaacggcaccagccaacccccagccacgacacccagcagccccccacgaaacaccaacaacaagccccagccagccgccaccaacgcagcagaacacccacaaccaaaaacacaaaccagcagaacacacccagaacaaaaccccacagcaccacgaaaagaacagcgggcaaggcgacaaacaaggacacaagcagaaggacaagagaacccaaaccaaaggcaagaacccccagaccccgccacccagacagccacaacagcccagcaagaacaaccagaccccggagccgaccagcgcaaaacaaaagaggccagcggccacacggaaagagaggcccaggacgcaaacaagccccagacaggggaacaccagggccaaaaagggggagggggggcaggggagggggggggagaagggggacggaagcaggaaagaaagagcaaaaccaaaaaaaagaaaaaaaaagaaaccgaacaaaagacccgcaaaagaccacaaccagaagacccacgcgcgaccagccgagcaaaagaccaaggcgcacaaaaaagagaccagacacaggggagggcagcagacaaccaaaacaaggcagaagaggccacaaaggacagaaaagcaaaaaaaaaaacaagacagaccgcagccccggagaagcaagcagaaagagagcacaagagacccacaaagcacaccagacaagccaaggaaaaaaaaacacaacacacacacacacacacacacacacacacacacacagcaccacaaagcagagacaaacagaaaacaggggaaagaaaggagccagacaaggagaccaagacaaccagaaccacaggcagaagagcaacagagaaagcagcacaaaacaaaaaccaagcagacaaaaccagcagggaaaggaagacacacaggccaccaaaaaggcagccgcaaaaaaaaacgaaaccgcgaacacggcaacacccaaaaggcaacccccaagaaccacggaacaggccaaaaggagacgaacgcaaaaaaacacacaaccaagcagcgaagcacaaagccaaaaaaagagcaaaaaagacgaaaaggaaaaagaaacaaaaggaacaaagaaagaaggaaagagaggggacgaaggggaaaaaagaacccaaggggcccaaaaacccgacgcaagcaagcacccccggcccaagaggagaaaccagccaccaagggaggaaggcaagacaagacaagaagaagcccacccccaggcaccacacagaaagcccaggggagagagggagcgaaggcagggcccccagcaaacacaaaagaacacaggaccagagaaagccagagaggcacaggcgggcggacaaacgcaaaaagagagagaaagaacacgggcaggggaggacgaaggaagggccaaccccggccgagccgaggaaagccaaccccgggaaagaccaaaaagcaaaaaacccaggacagagaaggccagcaagcaaagagacagaaaggaagaaagaggcgccaaaccagagcccaacaaagggcacggccccgagaccgaagggaaggaacaaaccgaaaagcgcaaaaaggaccaaaaaagaaccgaacgaacacgagaaggaagggcgggaaaaggggcacagccgaggaacccgaacaaggggaccagggagggaggaggcggaaaaaccacagcaagcagggacggcaaccaaagaaaggcggaagggcaaagaacaacaaagccaaaagaaacggaagagggagagccaggaaaaaacaggccccagaggaacagacagcaccggcagggcccaaacacagaacccaggccagggcaccacacaaccagacaccacacacagggacagacacagacacagagcccacaaagcggaagccaccacaccaacaccaaaaaggaggaagcaaaccaacccaccaggcaccccacccagacaacaaagcccacccaacgaaagggcagcgccccaaggggacagcacgcggcaggaaacccacaccgacagagaaggaaaaagggccagagaaggaagaacagcccgagagcggaacaacagacaaaacggcccagccagcaaaggaacaagcgagaaccagaccgcccggggcccagaacacgcccaggccagaagaccaccgcagcagccccgcaaaaaggacacaccacagccgaccacgccacagacacccaaacacccaccagaccccaacacaacggccaaaccaagagaggcggaccaaacggacaaagcaggaaacagccacagacacaaaagagaagcacacagcgaacggccccacagggcagagcaaaaagaagcaaaaaaaacaaagaacaaaaccagagcaaagaaaaaaaaaaaaaaaaaaaaaaaaaaaaaaaagagacccacaaaaacgggggaaaaaaggaaacagcaaagggagacaaaaagaagaaacacgcagaaacaaaaaaaaaaaaaaaaaccaaagccagaacagacaaggaccagcggaggccacagacacacaaagcacacaaaagccgggagacggacaaacaagaggaacagaaaacaggacaaacagccagacaaaccccagaaacggcccacacccccccccagacaccaaaacaaaacagcaggagacaaggaagaagaaaacccgacggaggcaagcagaaagggacaggcgagggaagcacaggcgggggcaccagcgccgaaacacacgaaacccacaaaggcagggagaaggggggaccgaacgccacaggagcaaaggagccccagacaggagaagaaaggaaagcccacagcgccagcaccgaccaaacgagcagaccgacaaaaagggcaaaaaacggaagacgacccaaaaaaaggaagagcacaagggagggagcgaccacaggccccacgaacaaggacaacccagccaaaaaaagggggaaaaagccgggagaagggcccccacacgcagaacacggagccgcggaaagacaagcccacacacccccgggagaaaggagaggaaacacccaccccaggaaacagagacgaggggaaaacaggacggcagagcagcaggggggggggggaaaaaaaagcagggaaacaaagcccagcccaagacaacacaagacaacggcaccagcgaaaaggagacagagcggaaagaccaccaaagcaaaaaagagaaagaagcgaaaagagaaaaagaaagacaagaggaagagagcagagcaaaccaaacaaaggcggaacaggacgcccaccacaggaaagaaacacaaacaccagaggaaaggccagaagccacgagagagaggaaagaagaggcccaccaaagacaaaagaccaagacgagacacaccggggaagaagggagagaagaagagcgacgggaaacaaggcgcgccagaaaaaaagaacaaccaccaggccgacgaacaaacaccgccgggcaggcacgcagaacagcaggacaccagaacaacaaaagcacacaaagagagcaaaggagagcacaggagaagccaacacagggggaagcaagacgcacagcaaggcaagagaagaacagagaaagagaagcaagagaagaggagcaaaagagagagacagacagagacagagacagagagacagagaaagaaagagagagacagagaacaaagagaaacagagaacagagacacagagggagagaaaaaaagaagagaaggagaagaaggaggaggaggaagaggaagagaaagaggaagaggaaaaggaggaggagaaagaggaagaggaggaggaggaggaggaggaggaggaggaggaggaggagccaggaggcagacagaaaaacagacgggcagagacgcccggcgagagaaacccaaagcccacgcaggaacacacccaaaagaccacaccccaaccaaacccaaaaccaagcaacaaggccaggggcacgaaacagagaggcaaaaaaaaacacaaacaaaaacaggaagaacaaaaaagggaaagacaccaggaagggaacgacaaaacacagacaaaaaccccccccccccacacaagaagacccaacagaacacgggggcagggcagcacagacaggcggcccaggagcgagagcgaacccgggacccggggcaaaaacacagggaggaaggcacccagcccggaaccggccccgccaagaccgcccccccccccaggccccacaagagaagcaggcagaagcacacaggcaagcccaagccgacccaggcaaacccccccagaccagcaacagaaaaaagcaggcacaaaagggacgcggccccccccaccccaccgccaccccacccccacccccccccccaccccccccccccccccccccccccccccccccccccccccccccccccccccccagcccccccccccccccccccccccccccccccccccgcccacaaaaagccaaagccaaaacagccgccacaagaccgcggccaccgcgggagggaaccccccccccccaaaccccagggcacagggggccccccccaaccaggggcagaggcagagcccacccagggcgaggaaaagcgcgacagccccacgccaccgccagagcaaggggaaacggcggaggggccccccccgcacccgggccccagccccacaaacacaagccagaaacccacgcaaaacaggacccccgagaaacgaaagagaaacgcaaaacacagaaacgaagaaaaagaagaccaaaggggacacgcccccagaagggaacaacacccaggaaggagacagagacaaagggagcggagaaaggagggccacagagacgccaaccagggaccacccaaaagccccaaagcgacaccagcaacacagcaagaggcgaaaggacccgaaagcgccggagacagcggggccagcaaacacaaagggagccacagcagcaggaggagcacaggcccccaaggaggagcagagaaagaccaaggagcaaagagacgcaacccgagggcaacaacaacgaacaaccagaccccgagccgaccagcgcaagacaaaagaggccagcggccacacggaaagagaggcccaggacagcaaacaagccccagacaggggaacgccagggccaaaaaaaaaaagggaagggggaggggaggggggggggaagggacgggaagcaggaaagaagaggaaaaacgaaaaaaaaaaaaaaaaaaaagagaaaccacacacgaagaaagagcacggcagggggcgggaacaagggacacacgacaggagacaacggaacaaaaagaacaaaggaccacagcgcacagcagggcacaaagcaaacacccagccagaaggcaacaaacagacccagggagggagagcaaacacccggaccagccagacaaaaggcacccaggaaaagcggaggaggcccggcggccaggagcccagccccccagcaagggaaccaagagcaacagagccacaaaggggcaaggcaagggacaacgcccccaggaggccaagggcaccaagccgcacaacgcaccaaagggaaaacacagcacgcacaaaggggaggagaaccagaaacacaaggaaagaaaacacccgcgcccccccaaggagcgcagcaacccagcgggcacaagccccaacacccgaaaagagacgcacgcaagagacacaaacaagcaaacacagccgagagagccaagcccccacacgcgggccacaaaagcagccaaaggcgaccaaggccggagccagggacccccagaaccaagcacaggaccgggaaccgaagccccaacggggggaacgcaggccagcacagaaccaccagaccgcaacagaggacaggggaagacaagacagagagcacccaaagaaaagagggagaagcgaccacgccccagcacaaaggggaagaagaaccccaacagcagccagcgaaaacgacaaagaagacaaaaaaagggaacacaaaaacacggaagcagaacacagcaggaagaagcagaagaaaaaagagagcaaaacaaaacagaaggcaccaaggaagaaaccacaaaaaggaagagaccagaaaaaaaagagagacaccccagaaaaaccgcaagcaaagcaaggacgcaaagaaccgagaaaaaggcgagggcaaagaccagaggcacggggaagaacccagaaaggggaaaagagcaaagagcagacagaacgacaggaagcagacagaggcaccaacccagaaagcgcgagggaggcgggaacagaacacaagacaagccgcagagcacgagaggaaacacacacacacacacacacacacacaacacacacacacacacacacacacacacacacacaccacagaaaagcgaagaggaggagagaaaagaacgccacacggccgcaaagagcaaaccccagaagacaaagccagcacgccagaaaaaccagaaggcaacacaaaccgagcaaagaggcccacacaaaagagaaaacaggacaaagaggaaaaggccaacagcccagccgaaaaagagccgacacaccagaccacgaggcaagggccacgacgcacaggggagaaggagcgagccggagcccaggaaagccagagagacagcaagcccgacaggcaacgaccagcagaacgaaaggggacgagagaaggggacgggagcagggaaaacaaagacagaaacagggccaggggcagccagacgccaaaacagcccagagcacccccgccaccggggaccagacagcccccaagcgccaagaagccaagcagcccccgaagaaaacggaagccggcagacaaaagcccagcacacaaaagcccaaaacaacaaccagcaacccaggcccaggaaaaaacagagaccgagccaaaggagacacaaacaaaacaggcaaaaaacagagaccgccgccaggaaacacagaagaaaacagcgaggggacccgcagaaaaccacaccaccgggcacccgcgcccagacgacccgaaccaaggacgcgcgaagcacaacaaaaacggcggggggacccgcaacaccaacccacacccacccccaggacaagggcacagcacgccagacagaagcccccaaaccaagcaccagagaaaaaaaaaacccaaacccacagccaagggagccgaagacagcaaaccagcgagacaagccaaccgccccaaacgggcgacagaacaggaacaaacgcacagggaggacaccgaaagagaacaaaaaagacaaaaaagaagccgagcccacagcagcccaacaccaggaggcccagccgcggccaaccaggggcagagaccagcacgcccaccaagaccagcaggacccagcagcagagaagacagaagggcacaggccaaaaagcaaaacaaggcccacggaagaaaccagggaaccaggaagacacacaaagaccccccggacagaagaagggaccagcccacacgacgaccaacgagggcgacgccaacgccacagcagagaaagcgcgaaggcccaggggggagaaaagggagcacgacccgaaggaagacaaagaaaaagaaaaacggccagggaggagccacagccaacccagcacgggagacaggcaggggacgaggaggccagccggcacagaggagccagcacagccagggcacacagagaaacccgccaaaaagacaaaaaagaaagaaagagagagagagagagggagggagggagggagggaggaaggaaggaaggaaggaaggaaggaaggaaggaaggaaggaaggaagaaagaaagaaagaaagaaagaaagaaagaaagaaagaaagaaagaaagaaagaaagaaagagaaacgaggcaggagccacgcacaaaacggaagaaagagaaaacgacaaagaaaggaagggagccaaaaccaacacaaaacaggacccaccggaagacaaaagaccgcgagagagaaacaaaaaaagagcggcaacgccgggccagcgggcagagcagacgaaagcaggggaagcaaaccaagaaaaggacgccggcaaggggccggaggaacagaagcccccagcaggagaaaacagcgaagacgcccaaccgaagccgcggcagagaaagcaagagcagaaccgaggccagagagagcagaaaacgcaaaaccacagaagccagacgagaaagggaggcgagagagaaccacacagccaaggagggccaggaaggacacacgggacaaagcaaaaaccaagaaaggagagacaaaaaaccaaggcaaaaagaaaggaggagccgggaaggaaacagccaggcacacaaggaggcggagccaagccgagcaaagccacagaagccagggagagcaccaaccaagggaacaacacgccaccacgcagaccgacgcaagaaggcccgagccgccgccaaggaccaaccagcccagcaggaagccgcacgcgcagccagggcccacacaccccacaaggaggcccccaccaggaaacaccagagaagcagcaggggaccaaagaaacaccaggcaaccaggacgcccgagccccacagagacaccaaccccccagagacacagaaacacagcggccaccagaaccaccaacaaccacaaggccaggacaaaaccagaagagggcgggaagcccaaacccccaggggaagcaaagccacccggcgggaaagacaaaaacaaaagagaaaaaacccacgccagacaaaagcacagacagaacagcgcaagggaacaaaggcacaaaacaaaacaagccaaggaaaaaagcaaacaaaagggaaacgaaaacaacaaaaaagaacaaacagcagcacaaaagggccaaagcaagagagagcccacaggagcagaaaaggaaaccaaggaaaggaaaaacacaaaagggaagagcccaaaaagaaccggccaagcacacggagaagagccagcagaacagggacagcacgagagaccaagaacgacggggaaccaggaggagaggcagaaaaacccaaaagacgaccaagagcaaggccccaaacaagcaagccccacgcacaaagggcgccaagagaacacacacaacaaacacaacaacgcaaaaagccaccaacccagcgggaagcgggggaaagaaaagaagccaacacagaaaacaagagacgccaaccacgacccaaaaacccagagacgaaacacaagcaaacaacaaaaccaaaggagaaaacacacaaggggaaaacaaacgcagggaaacaagcgaaccagaaaacccaagagcgagagaaagcaaggagaaaaaacaaccaacccccccagcacaaacgaaaaaacaaaaaaaaaaagagcaaccagaccacaacgagaccagcgaacaacaagggacgacgcgagcagacaaaccagacgaggacaacagaaaaaacggacacacccacccacccacccaacccaaagcgggaccaggaaagaaagaaagggcaggggaagacgggccacagaaaagcccagccaccaacaaaacagcaacagaagaaccaaaaaaaagacagacagggagaacaggcgccacaaacgaaaaaagcgcaagagaaggagcaaaaccgagagaaagagccgggaaaacaaggaggggagggggcaaagaaaaggcaaggagaccgacaaaaaacaaacaccccacgccacaccaacagaggaaaaggcccacaaaccaagagggcacacaaacaggccggacgagaaaggaaaaacgaaagaacaccccacccgcacacaagccacaacagaagcaaaaaaaagaaagagcaagcgccagaaccaaccaccaaggccagaacaagaaacggcaaacacgaagaggaggacagagaagagccacgaggccggaaaggaggaagaggggacagaagaaggagaaccagcagggaagaaaagcaagggaaagcaaagaaagaaagaaagaaaaaggaaagacaaagcaccaaaacggaaaaagaacaaagaagagagacggaaacccagccagaaacccccaagagaaagacgacacggggaaggcagggggacagcacaccaggcaccagagaggagcacacagaaggaaggcggcccaaacaaagaggccaggccaggaaacaaacgacaagaaaccagaagacagagaggaagagaacgcacccaagagggacaaacacccacaaccccacgggaacgagaagaaacaaccacaaaagggagaagaaggacaaggagcaacccaaaaaaaacacagagcacccaccccagggccaccccccggcacggaccagggggcagaggcagaagacaaaggcgcaggggggaaaggaacggagggaacagggcgaaacaacagagagagaccaaaaacacacagaacagacagacagcaaggcgcaggagcccgcaaacaaaacacagaggagaggaggaaagcaggagccccacaaagagcaagccagggggggcggggcacagcaacccagcacgggaggcagaggcaggcagacgagaggccagccggcacagaggagccaggacagccagggcacacagagaaacccgcgaaaaaaaccaaaaaccaaaaaagaaaaaagaaaaaaagagccgggacgaaagaccgggagaggaagagcaaggaagggaagcccagagaaggccacagcccaggaaaaggcagcacaaaacagaccagcaaaagacaaaacaggggggggagggacggggaaacacggaagagacacagagaacagaaaggcaaaaccagcacacaaccagagaacccagaaaagagaagcacagcaacagggagagacacggggaagccaggcaggaacaagacgcaaggacgagaccaagcagggaaccgagacaccaagaacagagagaccagacaccaaaaaagaggcaagcgacgaccggagcacaagaagaacacaaggcaaggcacagaagagcacacagcgaagaggacaggaaagcaaaaaaaaaaaaaaaaagaacaaaagccaagaaacagcaaggacacaaaggggggagagaagggagaagagaacaaggacaagacaggaaggaggaacgcccgggagacccagcaggaagagcagaggcagacaggaaggaaagcaggcgggaaggccaggaaccaaaagcaggcacaaagcccaccccccgcacaaaacgccccagcccacgagcagagcagaaaaccaaggcacgaagcccggcgacagcaggcaacacggccgggaggacccaccaaaaccagaacggggagaaaggcaagacagacagggaacagagaagaaaggccaaccggcacagagaccgaaaaacaaaaacaaaaaaaacaaaggggggagggggcaagagaagagaaaaccaacagggagccagcacggacacggggggcaacaccacacgcagagagccaacggaggcaaggcagaacaaacccgcaacacgagcccgacacagggccccagcccccacaacaagcaagaaaaaagaacgccgcccagcgcgcggcgcacgggaaaacaaaggacgaagcccacgagcggaccaaaagagcgaggaggagacccagccaacaggacccgagaacacgagaagccgcacaacaacaagcagaaaaagaacaagcggccagccccccacccaggagccgggaggaccacaccggaccagcgagcccgaaggacagcacagccacaaacacccgcacaagccccaaggcagaaaccaagaacacagaaacgcggaagacccccaaccggggacagcaaaggagaagaaagcccaagagcaggagagggggaggggaagaaaaccagcacagaacacaaagcaacagaagaaagacagagaaggaggggaaaggcaacacggaaaagcacggaaaacggaagaaaggcagagagggacagcccacagagacaacccaaaaccgcacagacaacaagaaggccagaaaaaaagcaccaaggaacagcaaagacggcaaaaagggccacacccccaacccagagcccagcacaaacgccagacagcggacgggacgcaggaggcacccgaaagccagagggacccacacaaaaagaaaaagaaacaaaacaacacagcaacaacgcgaaaggacaacacaaagaccccccagccccccaaaaaaaacccacccccccccgcaccaacccacccacccgcccggcccggcacccacacggggcaagagcccagggaccaagggccccccagaaaccgacaggccacccgcacaagcacggagccagagcccccaggaccgggggacaacccaccaacccgccacccacggaaacccgagaccaaagacgaaagaagcaaacccgcagaaaaagaaaaagcccacgacaccagaaaacaacgcagaagaagggcgagagggcaaacagagagcccgcgccaaccaacaccacaaaaaacagacacggcagcaccaaaaccagcaccaggaagggagaagaagaagagaggccagcgaaaacagagaacgaaaaaaggaaagaggaggaaagaggcaagaaccaacccaacagaacaggacaggcgccgaccagagcaagcaagaggaagggcgagcaggaacaccgaacaccgagaacaagagaaagcaggaggcacgcgagcaaggcagacgaagaaaggccagagcagccagagcacgagcacgaagagcaagcgagacgaaagcccaagcaaagagaccaagagagaacggcacgggcgaaacacagaacaaaacacacaagcggaagacaagcgccgaagggacagaagccaagcaaccagaaacaggggacaaaagagaaaaaaaaagccagagagaaagcaacagccaggcagagaacagccaacagaccaccacgacagccgagcagcaaaagcaaaggagagcaagaaacaaaaggcagaaacacacagagcaagagaaggggcgcacaaggcaccaaccaacaccaacaggcaacagcagccaagacagacagagaggcacccacccaaacacagacaaacagccaaaaccccaggggggggggggggggggggggggcacccgcacccaggacaacacaaagacagagaagaaaggaagcccaaagaacaccgaaccaagcgaaagaagcaaaagccggccaaaagcccacggaaccccaaccggcaccccagccgggaccagaaagggccacggccagacgggacagaccgaaccaggccgaccgcccaccaggggacacccaagaacacccaaaaaagaaggaaagagcggacaaagggacccaaagaaaaagacagccacaggacaaaagcaggcaccacacaaagcaagacacaaaccacaagaccaaggcaggggagagaagcgaaagagaggagaaacacaaagcaacgacaggggagaggggaaaccagagccgacaaagacagcaaggcagcaaaaaacgaaccaacggcgcaaaccaaggagccccaaaccccaaaaaaaagaaaaaggagacaggaaggcacaaaaaacaagaagacaaagccgcggacccacaaaagagccgggccacgacccgccagcaaacgagaagacgggccaagccgggggaaaagagggacagcaagcaaaaagggggaaggagaggccacaaaccaaagagaccaagcggacaggcagacaggccgacaaaaccgagcaggggacaacaagcacacgaaagggagacggcagacaggaaaaaaaaggaaggacccagagaaaccacacagggcccgacaaaacagacccgaagaggcacacagaaaccccagcaggacaaccagcacgagagcccagaagcggacgggccgcggagacccgggaggcaccgaccgggaaagacaaagcagcggaaagacccgggaccacaacaaccaggaaggcacaccagcccccagacggagccagcaccccacacagaggcgaagaacccccggcggcccaaaaggggaaacacgcaaggccgaaaggaaggaaaggggaccaaagcccgaagacgccacacagacgacaccagaagaaaaaaacgaagcagggaggggacacacccagaagaaagaagagagcgcaggaaagagaacaggagaggaaggcacagcggagaaaacaggcagggacggcacaacaacccgggccagggcagacgagggacagaagaaagaaggagggaaagggccgaaagggaacggagaaggggacagaaccaccagcaggaagcccggcacggaaacagagaggccccaagcgcaaggggaaaaaaaaaaaaaaaaaaaaaaaaaaagacggagagaggagggcccaaaaggccacaaacagcaagaggcggcggacccgaaccgcccacccaaagcagagaaagagacaaccagcccgcagaaaaacacgaccagaacagagaaggaggagagacggaccaagagagagagggaggcagcacaggaggcccacagaggccagaagacaacaagcaggaagcagaagcaaaggagaaaccaaggcagaagcaggaagaaacggcccaaaaagcagcaagggcgaaacgcaaaccaccggcagcccacggacaaaaaccgcccggcccagaccccaaaagaacagagacaagaggaagccaaagaaaagcaccccaaaggccacaccaagcgcccagccacccacgggccagaagccgcgacgaacgccggcaggagagaaagccacacagaccgaagcgagccagaagcacccccccccaccacccaaggcggaacacagaccacaccaccggccaacagagcggaaagcaggacccacagacaacacacagacaaggcagccaaagaagaacacccaacccaagcgcgaaacaagaaaagacaaaaaccaaagcaccccagccaaaaaaacaaacagaaacaccccggaagggccaaccaccaaccaagcaacaagacccagaagagcagaagcaaagaaaagaagagaggaaaggcaggccaaagaccacaaagaaaagaaaaaaaaagagcacgggaagaagagcacggagacggaaaaagaccaaccaggccagcacagacgaacccacaaaggcaaaacagagcccagcccaaacacagagcagagcaaaggcgaaaaacgcagagcgcacagagcgacaaacagcaagaacccaagcggcagcagggaaaccaaccaggaagaggggccaaaaagcggcagcgccgcgaaccaacaccccccacggaagagacgcacccgggcaaagggcacggagcaaacaaaggcccacaccccaaagggaaaaagggggcacaggaagccacggcagggaacacaaagaagaacaaacacaacacgccaaaacacaagaccccccccgccccccccccccccacacacacacaccacacgcacacgcacacgcgcgcacacacaacacacacacacacacgcgcgcgcgcgcgcagcaccaaaaaaacgaaaaagaaaaaagaaccagagagacaaaaaggaagaaaaggaggaagaaggacaccccagcaggaaagcggcaaaggcaggaagacaagagggaggaagcagcgaaaagaaaagaagccagaccgcacacccaccaaccagcgcgcaaaagaccaagaagagggcaccaaacaaaggacagaaaagaagaagggacaacaaaaagccacagcaggccacagaccgagaaccccggaccaagaagaaggaaacagaaggagcaaaccaaaaacaaaagcgaaagcagaaacagggcagaacagaagaggaaggaaggcagaagggcgggagagggacagaggaaagagagcaaggagggacgggagagaaaggaggaggaaggccggagggaagacaaggggagaacaaggagaaaagagaggaagaaaggacacagagacacacagaggggaaaaaggaaagaagaaaacaaagaaaaaagaacacaagggagagagagagcggagaaagggagaaagagaaggaccaggaaagcagcaccagcagacgagggcacagggaaaaaagccgggcccgagacaaacacaaggaggacaccaggaaggccaggaaaagacaccgaacaagaccaaagaaacagaaagacacaaacacacaaagaaggggaccgaaccaaaacacagaaaacgaagcagaaggaagcgccaagacacaagggaagcggcgaaaggcaaaagaaaaaacaaacagcgaaccaacagaggcacaccagccaaggcccaacccaacacccagaagaaaaagggaaagaaaaaacccgaaacagacccggcgaagagaaaagaaaagagcacggcccaagcccgcaagcaaacaaaccaaaacacacccccgccaaaacaggcaaaccaggcaccccaaaacaggcgaacacaagccgcccacccaaaccagcacaacaggagcagaggacccagaaaaggaagaacccacacaaagaaggagcgcgccaaggcccacaggccgcaacagaggccagagaaccaaaggaaaccaacaccaagcaaccaaaagcccccaaccaccaccccccgcccacccaccccccggcccgggccccgacggggcaaaaaggcaagccaagggcccccccaggaggccgacaggccacgaaaagcagcagagcaagagcccggggacggagcaaaggccaccaaggggcagacccagcccgggacccagcccccagggggcccagaccaccaaccgacggagcaccaccgggcagccaaggcaagaacaacagcacccccaacagacccaacaaagagggaagaagacaccaagaagggaaggaaagaaaggaaacaacacaccccagaagccgcgacgcgaaaagccaggaggaaaagacccgcaagggagacacaagaggcagaaacgagaggaagacggcaaaccgaccacacaaagagcccgggaaccaggcgaagcaaacagacaaaggaggaaaagggcaaacaaaaaaagaaacacagaacccagcgaacagacgagaaaaagccagcaagacccagccggaacgggcacaagcgggcacaagcaacaaacccaaaaggacgcacaggacaaaagagagaaaacaagagaaaaaagaagaaaaaaaaaaaaaaaaaaccccgcaaagccagaagccaacaacaccaccaaacaaaagcaaaagagaagaagacaagcaacccaaacaaagcaccaaagggcccgggggaacaaacagacacaaccacaaaggacaaaaacagcacaaaaaaacccgcccaacagagccaaccaaaccgcccccaacccggaaagacaaccacgccaaggagaaagcccaggggagcaaggaaaaaagagcccccacggaaagagaacaaaagagaccacccaacacgagagaaaaagcgacaggaagaaaacaacccccaaagaaacggcccaagggcaagaccaggcggagcacaccggagcagagagcaagcaaacaaccgaaacacacaagacacaacagagagaaaaacagaacaagaaccaagagcgacagcaaccccaccacagcgagaaaaggccaggccaacgcacaggaaaggagggggccaaaaaaggaaagacagaaaagagacgggcagggaaaacaccccacgcgccaagacggagaggcgagggccggggaaaaaagccagcagcccacgggcgagaacgccgcaagggcagaaaaccagcgccccccaagaagcagaggaaggcaccccgcaaagcggcaacaacggccgggcggcaaaaaacagacagaagacacaggccccggcaacaccaggagcgacaaacggcaagacgacaaggcaacagggaagaaagagggcgggaaaaggcaggacgccaacaccagcccacaaccagacgaccgggacccaccaaccacggcgcagggcaccacccgccagacagggcgagaaacaacccgaaacgagaaggaaaggaaaacgccccaacaccaaacgaaaacgcgaccgcaccaaagcaaaaaaaacaaaaaagggaaaccaaaaaagaaggcgaacagaagggaaaaaacggaagaaaagacacgaaagcagaccacacagaacaagcaacccccccccccccccccacaccaaaccccacacccgcccccccaggcgagacagagcccaaacaaaaaggacagaacaagaaaagcaagccccggaagcagggccacgaggcaaaacgcgaaccaaccaggagcagcaaacagacgccgcagcccccgagagcgggacagagcggcaccacaaaaacagccacaaaaaaggaaggaacgacaggagggggcccaaagaaaaaaaaaccagcaagcaacgaaacaagaaaggaggaaaagcacacagggaaagaaaggcgacagcaacaaccagaacaaaaggcaaaacaaggcagggcagaacacacccaaagcaacacacagcaaagacacgaacccccaagcagacaaggccgcggcagccaggacagcaggagaacaacaaaaagccgaacacagaacaagaagacagagggcagggggcccaagggagacacaaaaaagcacagggagccccaaaacaccccggggcagacagaacaacacaaagaccccccagcccccgaaaaccaccacacccccccccgcacaccaacacaccaccccacccggcccggcagccccaacagggcaagaacccacaggaccaaggacccccccagagaccaacaaggccacccgcacaacagcaggacagagcccaccaggcgggaggagacccaaggagccggagaacggagcaaggccccaggggcgcgaacccacagccgaaccaccccaggggaccggcgccaaggagggcgagcaccaccgagcaggcaggcagaaccccaggagacagcaacaggcccgcgcaagcaggcggaccacaagaaacggggaagacgaaaaggaaggaacccagggggccaccgagggccccagcggccacacggccgaacaccccaggaagccccaagaaggacaaacacacggccccgagcaggggaagacgggacgagcgggcaaaccacacaggaggcaacaggggcgcagggacccaccaggagacaccccagaccaccagcaaaaacaaaacaaaagcgcacagacccaggaaagaccccacaaccacccgggggacaagggcccagcgggaaaaaaaaggcgcagaacaagggagcaggccaacaccggagaaccggaaagcccaggaaaggagcggacccggagacagccaacgaggaacgccacacgaccagaggggaccagcgcaacccaccagcaaggaggaaaccccccacaccgcagcacgcgcaccgaggaacccacacacggcacgacgacaaaggagcaaaaccaccagggggaaaaaaagacagcacaaaaagggcgccaacaggagcaaagaagaagggaagaccacacccgacaaagcaaccaagggaaaggacccacaaaaaccgaaacacgaaacaagaggagaaagggggaagagccggaacaagggcacaggggaaaacccaacagaaaacaagccgacgaagacaagaaaacaaagggaccaaaaagcaaagcgaaggcaaagaacacgcaaaagacaaaaaggccaccaacagagcaaaaagaacaaccaaacgaagaggacaaaccaaaaacaaagaacaagaagagaccagaaaccagaaaacacaaaaaaggggacagagaaaacaaagaaccaacgaggaaacgaaggcgagaggcaccgaaaaaagcaacaccagcacagggagagcaaaaaaaacaagcgagaccaccccaccagcagaagacagacccagaagcgaaaaagggaccccccaccaaagcaaagcgaaagcccccggacccccacagaccgacagcacaggacacagaaccacaaagacacacacaccaccaaggccccaaacacgcacagcccagccgcaccacaacaaacagcccagcggcaccagccaggggcgaagccaaaggccgcgccaggcccaccaggcccaaggagaagccaaaccacaacggcacagggaaaaaagggacaaaagcaacggaggggggaagggaacccaaggcaacaaaaccagaaacacaagcaccaaggccaaaacaaaaaagaccgggcaagcacaaccacaggagaaaacgggaccaagaaagagcgaaggcacaaacaaaacagaccacagcaacagcaacaaggcaggccgaacaagaaaaacgaccccacacagaagcaaagggcccaaaaaggggaagaaagacaaagacagaaggaaggcagggaaggaagcagaagaagaggaaccagaagaagaaaaccacaccgagacacaaagagagacaccccggaaaagcacaccgagggccccacccaaagaccacaggaacccccgacaggccacaagcaagccaccgcccgaggccaaaggagcggggccaaaacgaaccaagaggacgacgagaagcagcccaaaagccgcaacacaaagccacagccacgggcgagccaccacccaccgaacgcagacagcaaggggccccaaacgcacccaaccagcccaccaaaacagagcacaagcggaacgcccacccaacaaacacccggcaagagaaaaccaaaagaagaagaagaacaagcccagaaagagagagcagggaacacaaagcaaaaaagaagggggagaccagcagagggagggagaaggaccagggggggcagagacacaaagaagacagagacaaaggaccaggcagaaagagagcaccaccggcacaaaagaccaccagccaacgaaaccagaaggaccaaaacgaaccaacgacccaagcagacgacgaaaacaaaagagggaaaccgggaaggcgagagcacagaggcagacagagaagccaaaggaccggcgggcggacggaaggaagagcacccaggggacgggaaggcagaaggggcagaagaacagcgaggcggacagagaggccaaggaaggcagggaagggcagcccaggcaagaggcccaggacgaaggagcagcaaaggaggaggcggcaccagaagagagccagagaggcaagaaagccaggcagcagaagacaacaggggagagcaggccagagagaccaccaaaaacagcagcaacagggaaacaggcaggaagccaggagacaagggggcacaaagggcagagcgaagaaggaccaagcccggaggaaccagaagacggagggacccagacagcacagggaggagcgaggacggcccgagccccccgaaggaagaaagaaggagcccaccgaagaacgaaaaaagaccgaaaaaagaaaggaaaaagggaggaacagagacagacggggacaaagaagaaacgccagcagccagccaaaaaccacggaaaagcacaagagaacaccaacagccccccaaacgccgaacggcccaaagcaggcagggaaccacgaaccaccccaccagaagccccggccaaacagcaaagacaccgaccaaggccacaggacgcagaagccccagagcccacaacagacaaggccggccaaagccagacacccgacagacaaaggagcaccacacacccaaacaacccccaacaccgcagacagaaaaacaagaaaagaacggagaaaagaacaaccagaaacaagaaaaacaaggccaacaggcccgaaaacggaacaaaaaaagaaggaaggacaaacaaaaacagaaacagaagaagaagaacaggagggcacacacggccaccggggagaggaaaggacaggaaaaaaccgcaaaagagacaaggagcaccagggcagcacggaaaaaaagaggaacacccaggagagcaagaggacaggaaggaggacgaaagcaagagaccccgagaaaagaagaccaggacagcaggaacccacccgaaggagccgaacagcccgaaacagcagacaggaggcaccaagagcccagcagcccgaagggcagcccggaaacagccagccagaacaggacgccaaggggggacagaagagacgaagagcaagggaagagcaaggcggggccggaggaacgaagcaacagaggagacccaggagaagacggcaaccgagcccagcgaccaccgaaaacaaaggaaacaacgccaaccggagcgcccaccccaaccgcaagaagcgaccaaagaggaggaagcaaggccaagagacgaaccgagaggagagaagcggaaaaaaaggaggaagaggggaacgcaaagcagagaacaaaaaaaaaaaaaaaagggcgcgcgagcaagaaaagcagagaaaagaaaaagaggccccggccagcccaagaccagcacgaagagggcagagaaacacaagaccgacgcaaaagaaacaaacaaaacaacaagagaacaaccgaaacacacaggcaagaagacaggccacacagaaacaaccccaaacccaggaaagcaaaaaacgagaaacaaaaaccaggcagaagccccagcacacaccggggaaggcgggagggggccaccaccaacgcccagagccgacacaggggccagcccagggagcaggcggggaaaaaagcaacgcaaaaaccaaaggcaccaaaaaccaaggggaccagaagaaagcagagcagcaagaccccacacacgggcccaagaacaagaacaaaaaaaaaggaaaaaaaacaggcaaccgaacgggcgcaaagcagaaagcagggaagcacagggcccaaagacggaaggcccacaaccaccccaaacacaaacacagaaggaaaggaaagagagagaagaaacacacaaagcagaaaaccacccaagaaggagacaaaaaaaaggagacagagggaaaagaagggcaccccaagccagccgaaaccagcgggcaggaccaaggaaagggacgagggaagaacaaaaaacaggaccagacagaaagacaggagagaacagcgggaaacaaccaggaacaccgccacggcaaagcccgcaaagcaaacaaaaggagcaagcccggaggccaggaggagagaagaggacgcaccccagcccaaggagaacgccagcccagaaccaccaaccaggcccaaaccagagcagaagaccgggacaaaacaaccgagcaagcaagagaacccccagcaagaacaacaggccccagagcagcgggagaccaagcaaagaacaaggggccaggaaaaggcccagcaaaggaggcaaaaagaaccagcgcagccaccagacagaagggcaagagaaccaagagcaaaaaacgagaggcagaaaacaaacacaaaaccaaagagagaaacaacaagcccgggcaagacaaggaaggacaagaccagaacagaagaggcaccaagaaagcaccaagccccacccaacaacacccaagaacacaccaaaggaccagaaagcaaacaaagagcaccgcaggagcacaccgcagagggagcacgagaaacacaacaaaagaaagacaaagacaggaagaaaaagagcaagaaaacgaaggccagaagcagaccaaaacggaaaaaaaaacaaaaaacgagacagaagcagaaaagaaaggaaaagaacaaaagagacacaccgagaaaacacccgggcaggagcgaagcgaagccacgcccagagggacccagccccacgacgcgcccggacgacaaacacgacaaaacagcggggaaagaaaggaagcaaaaacacacaaggcacagaaggagcaggacaagaacaagcagacacaaaagcagacaccagaacgaagcgcgcaaccacaggcccagcagccacacaagccacgccagggaaagcgccaaggggcgggccccacaaaaacaagcagacaaccccaaagaaagccacaggaacgagaaccaaggagaccccccaggaaagacacgcgacaaagacagaaagcaaagggcgaggaaaggaggcacaaggcagcacaacaaaaagggaagaacaagaacccaagaggcgagacgagccagcacagaaaggagcgcccccacccaaaaaacacacagcgagagcaacaaacccgcgcgggaaaacgaagagaaaacgacaccccaacaaggcacaacagaagagacaaaaagccgaccaagaaagacaaaaacgagcaccgagaaagaacaggagaagaaaagagggggggggggagaaaggggcaaagaagggacagagcaaaccaggagaagagacaacaaacaacaggcacaccagcaagaccacaagcccgaacaagccgccaaccgcagcaggcaggaggaacagaagaaagggaaacggaagcagcgggcccgcaccaggaaaggaaaaaggcacaaaggaccaacaccaagcacccaaaagccccccacccccccccccccccgacccaccccccccccccagcggcccgacgaggcaaaaaggaagaccaagggccccccaaggcgacaggccaccgaacaagcagcagagacagagcccggggacggagcaaggccaccaaggggcagaccccgcccgggacccagcccccgggggcccggaccaccaaagcaacggacccaccgagcaagccaggcaagcccacaagagacagcaacgggccgcaggaaaacgcaggagcaagagcaggggaggcgaagggaggaccccaggaggcagccagaggccaccgccagcccaaacgccgaacacccagggggcccaacaagaaggggcaaaggccacaggcgccagcagggagagacgacgggacaagcgggggcacaaaagagacacgaccaaaacaaacaagaggagaaacaagacgaaagcaaagacagcagaagggccccgaaaaaacaacaggcccagcaagagcaccacggaagagaaaacgacacagaagaaagaggagaaagacggcagaaaggaggaaaagaaaaacacacaacaaccaaagggaaagaagacacacacacacagacaggacaacaaaaacaagagacaaaaggagaaagcaggaaaaaaaaacaagaacaaagaaaaaccacaagcgcagaaccagaagaagaggagggacgccaaaacacaggggaaagccacagggacccagccaccggggcaggacccaagaagaagggaggacacaaagacaccaaaaaaaaacagaagcacaggagaaagaaaagccaaacccggggaagaaaacacggagcagccccaacaaccaaagaagagaagacaacgagccaccagaagccagggcaagacacccgaggaaacgaaagagagcagggagccacccaaggagagggcaaccaaaggaaagacaaaaaagaagaaagggcgggaccggcgaaggagcagaagcaacaagaccggaccccaacagaaccagaaacacgccccaaaacccagcaaagagcagaaaacagaaaaccaccagcagaacacaacaggcaaaccacagaaccgggaaggaaaaccagaagacaagcccagggcacagggcagccaaaaaaaacacggacggagcaaagagaaagaaagcagcaaaaaaagaaaagcgcccacaaaggcaaacccagggaagacagggaacaacagccgaaaaggaacaaagagacaagacagaccaccaaacccaaaaaccaggcaagaacgaccggacacaaaaccacacaggaaggacaaccccacaacagagccacagccaaaacagaccgagcaccaagagaaagccacagagcagacaagccaaagagcgcccacaccagggagcgacacagcgaaacaagcaaaaagaagacacagaccaggagcagaaacagaacaacagggggccaaaaacacgcaaagaggccccacaaggccaaagcagggaaaaagccggaacaaggagacaggcaaacaggacccagagaaagacagcaaagacacgccggccggcgccccacgccagcagccacaaggaaccaccaagagccaagacagcagaagcgcagcgaacaaaaaggcaaagacagacaaggaaaaggaggaagaagagcaacaaaaagacccaccaaagcaaagcgaagggcggcgcggcccgcaccccacgaaccacaccacaccggacgcaccgacgggaaaccgagaccaacaaagaaaacaaagacagaagcgagagccagaggcagaccgcagaccagcaaaacaggaggcaagcaaaagcacagcacacagacagaacaagcacccagccaagccccagaccaaccagaagaaaagaggcccaaccaacagcgcacacccggccacaagacccaggcagcagcccaaacccggcaaccaacaaaagccgcagacaccagaaacccaagacaggaccaagccagacgggcagcaaggaggaagaccaaggggcaccaaggccagggacggccggccggaaaaccaaaggacaacgggacgccccaggggaccccaagggggacgagagaacacagaacgccccaagagcacgaccccacccgggaaggacagaccccgaaagaaaaccacgagaacacagaagcccgccccacagcaccagggaccaaagagagcccagaccaagaaggagaaacgaccccacgcacccagcagccccaacgaggacgaaccgcccgagggcaaaacccaccaccacagacaggcagaaccagcgcaaagcaagcagacaggagccaaaacaggccccacaagaagaggcacccgccagccaaccaggaacaagaggaaaggaccaagcaagaccacggaccaacaggaaaccaacgaaagggaaaaacaaccgaacagacccaggaagcaggaaccggcaagccgagggacgcacacagccggccaagggacacaagcacgggcacaagaaaggacagcaaaagggagaagggaccccagaacgccggaagacacaagcgcacaccaacaccaacaagccacaaagaaaacgagacacaaaagagacaaaaagcccaaagcaaaaacaccccaacaggagggaaaaaacacagaaaaagaaagggaagggaccggccaggagcaagcaagcaggccggcagaccgcccccgcccccaccccagcaaggaaggggcccaggaagggcaccaagaagaggcaaggaaaaggggcacggggagggcgagaccccaccagcgccggaagcagcccacagcagccagagaagaggaccgagcccccgcaccagcccaccagagcgcaagccccaccaagaaaggacgaacccgagccgaagccagcccaaaaaggcccaaagaggccggcaagacgcaaagagaaaacccaacaagacaccgccaaaaaacgaagaacaccaaagaccaccaaggccacacaggcaccccccgagacgaaccacggcaccaaagcgaggcagcaaacaaaagcccccagggcgcagggagccgccaggaccccccgcagcgaacgccggggacccagggaggggagagaccagggcagggggaccaaggaagcccccccaggagaaggaggggaggagaggggaagggaggagaggggacgggaggagaggagggggagggcagcgcaaccaggagaaagagaaaaaaaaaaaaaagacaaaagcccggccaacaaaacaaaccaaaagcccaccaacaggcacccgacaaaacgaaccggacaaacaccccaccagaggcagcacgacccagacaagcccgccccaaccccggccccccccccaccgcccgcccacagggaaaaaagccggcgagaacggggggaggggagcccaaacccaaaggaaaccaggaagagaaaaaaaaaccaaacagcacacagaaaagaagaagaccaggagaaccacggcaaaaccaccagaaaagggcacacaggagagaacccaaggcaaccgcccaaagacaccagaacagaagccccagaaagacggaaaaacgcaaaagaccgggcaaagaccaaaagagccaagcaagacaaagaaacaaaacaggaggagacaaaaggaaacaaagggacagccggcaacgccgaaaaaaagaacaaacgcgggcagacaaccggggccccacgaccagagagcaaaaaaaccacccaccgcggcggacaaccagacaaggaggaccaccaggcaaccaaaagcaaaggcccaaacaaaaagagaagaaaaaggcgaaacagagaacacagacccaaaggaaaggcagaaaaacgagaaagaacacccaccaggccccccccccggccccccccaaaaccagccaaggagccgaaaggacccaaaaacccgaagaccaaaagagccaaagggcagaggaaccaaagagaaaaccaaagaggagaaagccgggacaaccaacagcagaagaaaaaacacaaggaaaaggggaaaaaagacaccaaaagaaggcaacaaaacgccacagacaaccacacccaaggagacgacaaaaaggggacgggagggggggcgaagaaacaggagcgagccaaggggcacacgaaacaggcagccggccaagagaaggcgagcacaagaagggaaaaagacagagaagccaggagaaggcccagcacaaccaacaagcccaggccagccaggcacaaaaaggaaaaagaacgggacagccagaaaagaaggcaagaagaaaagagaaaggaagaagaaccaaaaccaggagaagagcaagcaaaagaggacacaccggaacagcacagccaggcaggagaccagaacaacacgacaagcacacagcaccacagaaagcagagacagccagggaaacccacaaccaacccagccggaagagacaggagccgcagccagagaccgggggagcaaacgaaacaaaggagaaagaaaaagcccagaaaacagccaagagaaacaagcacagagaggaaaagggcaggacaaaaagcacagaagcaccaacggaaagcgaaaacacaccagaccaaagagcgcgcagcccacaagaccaaaaacagagaagcaccaaaggaaaaggccaaaaacacaagcaggccagaaccgaggcaagcacaaagcgacaaagaaagaaagagcaagagggggaaggggcaaaaacccgagcagaacaaaaaaaagcgacacccccgaaaaaagaaagaaacaaaagcacaccagacaaacaagacaagagacagaaaaagagccaccggacaagaaggacagaaaccgcaggcagcaaaaaaacaggagccccccacaccagcagacagcagcaaagacacagaaggacacaaaaccagacccaaagccaaaacgaaaaaggggagagggaaagagagacaagccaacagccgaacagcgaagaaggaagccgcaaccagcacacggaagcccgcaagaaaccaccaaacgcagcaaagcagaaggaggacaagggcaaaggggagcgacgaaaagcaaaccaggaaaaagaaagagacaaaagggagagagccagagagccacagagcccacagcaaaagaaggacgcagaagaaagcacacaagggacgggggccaggacaaccaagcgagagaaagagagcaagggcagagagaaaaccacaaaaccagacaaacaacaaggacccaccaacaaagcggacggaaaggaagcaaggaaggaggaaaaagagaaggaagagaaaaaaaaaagacagaaagaagacagagaaaagacgaccaagaccaggcaaaaacagggaaaagcaagaccaaccaggcaccgacaggccagccccaccaggaaacagaaaaaagggagcagccgagggaaagaaaaggcaaacacgaaggccccagagagccgcccacagcagcccgggggaggagcgaacaccccccgggagaaagaaagaggacacccaaacacgacaacacaagagagggagaccaggagccaaccagccacaaaggagggcacgcaaggggggagccaccaccaaccccgagccaaaggagagcgccacggaggagacacagagaaaaggcaaaacaagcccgggccaacacagcaagggggggggggggaggggggccccaacaaggacccaccaaggaagaaacagaaaacagaaagcaaagcacaaaccaccagacgggagaaaaggcgcccaccgcagacgagacccaacaaagcaaaaagacgcagacgaaggaaggaaaaagaaaccccagcaaacaggaaacggggaaggaaaaggaagcaccaaagcaccccccagagagaggccaaggagggggcacagcgcgcagcccaaaaaagacagaaggaaccagaaaagcaacaccaaaaagcaaaaacgacaccgaagagcccccaagcaacacaaaggccgcgggaccacagaacccccaacaaaggccacaaaggcgaggcaagagcagagaaggcagggaagcaagaacgaggagcaagagaagcacccagcccagccaccaaaaagggggccaacaaacacccaccacagcccccccccacccccaacccccccccaaacccccccccacaccacgcccccacccagaaagcacaggccccagggacacaaccaaacaggcacaagaacaacaacaaccaaaaacccaacaaggaggagaggcaacccagaggaggaaaacagccgcagagcaggcaaaaagcagagacagcccaccccacgaggagcccaaaaaccaagcaaaagcaaacaaagcacaaaacaaagcacaggacaaagaccagcagccagaggcacccaccgggagccgagagcccgcacagacgagggcccccgccccaaccccgaaccaaagggccccccaagacccgagggccacgggcagggaccgaccccaaagcgggagaaaaacccggaaggcggggaggcacgacaaagaagcagaaacacaggaaccacagagaacaacaaagaaacaagcaaaaacacagcccaggaagaaaccgcccccaaagaaaaaaacgacccgcaaagaaagggagcgcacacacgcaagaccccaacacacaccgcaccaaaccaaaccaccacgagcgaccacacacgaagggaccaacccagaggacgaaaagagaagcaaaccaaccccacaccaaagccccaccaaagggacacagacaaaagcacaaaagaaacaaaaaacagaaaagggaaacagaaaagagaaaagcgaccaaagaaaaaaagcccaagaaggaaggaacaaaggccaaaaaaaaacaagaggcaagcagcaaaaagggcacacgaaagagacaaggccagaagggagaaaaaaaagaaagccgccaaacagggacaaaaaaaaaaagaaagggaaagaaccagaaaaaaaaaaagggggaaaagagacaaagcaacacaacaaaagcgccccgacggggaaggccaccacaagggaagaagagggggaggaaggaacagaagggagaagcagcccgcacaggaaaaaagcacacaagcaaaaaagcacaacccaagaagggccaagcccacacgcaggaaggagagaaaccaagacaagggacaaccaaacccagaaaagaacacagcaagagcaggaggagaaaaaggccagccaagacagaggcgacacgccaagaaacaaacaaacaaaaaccaaaaaaaaaaaaccagaagggaagggggaggcaaaaagaggcaaacgaagaagcaaaaacaagaaaggcacaaacagagaaccaccagaaacgacagaaacggaacaacaaaaagcaaaaacaaaccagaagcgagacaggaaacagagagagaccaagaaaaaaaagccagaaaaacaccagaaccggcacaaaagaagaggaaacagcaaaaaaacacaagaaagacagaaacaagaaagaaaaacccaagagagagaaagaaaaagggaagaaagagcccagaaagaccagagacacagcacaccgagcaacaaaaaagagggcccaagcagaggaaacgcaaaaccagaagaaaacaaaaggcacaagccaaaaggaccaacacaaagacccaaaagcccaacccccccccgcccccaccacccaccccaacgacccgggccccgaggggcaaaaaggcaagaccaaggggcccccccaagaggcgacaggccaaccgcacaagcagcagagacagagccgggagacggacaaggccaccacaggggcagacccccagcccaagaacaacagcccccagggggcccggccaccaagcgacggagcaccaccgggcaggcacggcaagcccacagagacagcaacagggcccagcaaaacgcggcgagcaaaggcgcggggcgagacacacaaacacagccaccaccaccaccacaccaccaccaccaccaccaccaccaccaccaccaccaccacacacacacaaaaaagaagcaagaagacagaaagggaaggaagcacacaagaaaaagaccaaaaagcaagcagacagacaggaaaacagcaagcaccagaaaacagggaaagcaaggaaccggcccccagcaaaagaaagacaaaggaaagggaagacggcccagcaaacgaagccccggcaaaaaaacacggagaaagaaaacaagaacaggcacaaaacgaccagggggcgccccagaaccacacaggaccagcagaaaccaagcacggcaagaaggggaaaggacacagaaaggacgcaagcaccacgccagggcaagccaagcagaaagagcagcacaaggagcgggaaagcaaggcaagaagggggcaaacaagaaagagagaacccgcaaccaacaaaaaggcacaagagaaaggagaaaaagaaagacaggccgccccaccgcaacaagcagcccacaaacccaaagaagaaaaaacagacaggagaacaccgggccacccacaacccgccaaagagccccacgacaagcccccagcagccgcagcagacacgaaaggaaagcagaagacagaacccacaaaagaacaaaaaccaaccccgcagcgcacaagcagacaagcgaacaagcaccacagggaaggaccaagaacaggcaggacacgaaccaccaggagacgggcagagcgacaaaaacaacgaaagccgcgggaagagggcccaaggcgggcagggcagaacaaaccagcaagccaacgcgacaacaagaaggaagaggcagagcagcaagaagcacacacgagaacaaagcaccaaaggaggacggagcacccaaaagccaaaaaaggaaggcacagaacaagaaagaaggaaaacaaagaagaaggggccccaagacaaaaaaaaagggcaagaaaagagcacaagaaaaagcaaagaaagaaaccaaaagacacaaaccacggaacacagagaagcaggaggagaaagggaggcaaaggagaacagaaggacgaggacagaaagaaaggcgagaaggagaaaaaaagaacaagaaaaaaacagcagcccaaaggcaaagggagaacgaaacaggaaaaacggacagaggagcggagggaaagaacagagagaaagaaagaaaaagaggaagagaagagggggaagacaggaggaaaggaaagccaaacaagcacgccgacaaagagccccaagcaacaacaacagaacaaaaggcaaaaagaagcggggaaaaagaaaaggaaaaagcaggggaggaaacgacaaaagacagagcgaagaaacacaaagaaacaaagcaggaagaagaagggaacagaaaaacaacgagagaacagcaaaacaagaaacaacacggaagcaaggagaagaggcagaacggaccagcagacaaagaacacaaacgccccaaccagaaggaaaagaacagcaccaggcacagagcaaggacaaaacacagaacccccaagacggcaacaaaagaaaaccgaagaagagaaaaaaacaacacagaaagaagaaacgaccgcaaagcagccagacaagaaccgaagacccgggcacacaaaccacggaagggcgagaagaggcgcgagccacacagcccacagagaacaacagggacaaagcccacaaaccaccacaaagcccacaaagccccggcacacaggacagcaaggagcgggcccccacaaggacacgaggagaggaacaagggcacaagcagaggccccgaggaacaggaagaaggggaaaagaggccaaaagaacagggaacgcagcaccgggagaagaaagcgaaccaagacaaggaccagccagagcaacggggccccaggaggaagaccaccccaccacacaacaacaccacaccagccccccaaccaccgcacagcccccccccgacagccacacggccacagcgacgagagagagaagggcaacaacaggaaaaccacccccaaaaagaaacacggaaaaacaagcacacacgaccgcaaaggcaagacaacccaaaggcagaggggacacgagggccaagacaccaagacaagagaagcagaagccagaagcaaaaagcaggagccacaccgcgaagaaaaaaggagggagaaagcggccggaaacccccaggccccaggcagaacccccccccagcaaggccaaaagaagccagagcagaggccacgggggaaaggcaccagaggaaaaacaaagagaagacacaggagagggaagagcagagaacaaaggcacaaaaaccagcaagagggcaggaagccgaggacagcgagagaaaggaagaaaaccagcacaaagaaagaggaggggccaagaaaagagaaagaaaaaaaggcaaagcagcggaacaagcagaacacaggaaaaacaaaaaggcagaaagaaaaaaaacaagggacaggaagaaggaagccaagaaaaaaggaggcacagagcccaaaaaaccgacaaacacagaaaaaaaggcgagaaaaagaaacccaccaaacgcacaaccgaagacacgagaagaagaaagcagcagaagcagacgaacaagaacaaaaaaaaaacaaacacaagcaaaaggcaagacacgagaacacagcgcccgagacacaagcaacaaaccaacaacaaagcacccccgggagaagaagaagacagggaaaccaagccagcagcaccagcagcaaacaccacgcaggggcaagaaggacgcaacacacgaaacccaagaaagggggggccaaaggacggaaggaggaagggagggagcagaaaagcaccagaccagggacagcgacaaacagaggaggaggcaaaagagcgcaagcagccaggcagcggagagaacaccaagaaaggagaaggaaaaaagagagaacagaaagggggaagaggcacgggacggagcccgaaagagaaaccacagaaggacgagcaaagggacccaggaggaacgagacccaggaacagagagaaagacacagagggagagagaaacgacaagggacagagagcgggcggacagaacagaggcgcgcaacacgacagccaacacacaagggagggaaaaacagaaaagagcaaagaaacccggagcccaggcaacggagagagacagcaaagccagaaggcagcaccgaagggcgagcaaaaagagaaagaccaacaagacaacccacagacaaaaggaaccaaacacacaacagaaggagagacagaacccacaggaggcgccaagcacggaaaccaagcccccaaaacagaagcagcaggccagcaggcacgaaaccccagcccccgaccagaaccaggcagacacgccagccgcacgaacagggaagagaaaaaaaaagaaacaagagaacacaacgacaagcgagacaaaaccacaccaacaaaaaaaacccggaacaaaggcaaggccacacagggaggaggaaacggagcacagaaagcgaggggggacacgaaaacagccgaagagggaggcgaaaccagaaggagaagcccagcaaaacccggaaacgggaccagaaaaccagaaacagcagaaggaagacggcccaccaggcgagaacaccacgcgcaaggagaggcaggaaaaaaaaaaaaacaagaaacaacaaaagagaaacggccgcaaaaggcgaaggaggcacccagggccccacaccgggaggaagaaagagaaaggggggaggacgaggcggagcacacagcccgccggcggcagaagcacggccagagaagggaaaaacaaaccaacagagaggggaacacggagccgagcaacaggagacgccaggggggaagcaaaagacaaacaaaccaaagacggcaaaaacaggcccagaagaaaagcaaaacaaaacaggagacaaagaacacgaacaagcaaagaagaaagaagaaaccccagggacaggaggaaaccagaaacacgaggccgaagcacgaaacacaaaggaaggaacaacgagccaggccggcacaccaaccgcggagacgaggccccgaacagaagaggaaaacacaccaaccgagacacgaggcacgaggaacgagacaacccgagagcaagccaccggaacaggaggccaacacgaagcccagcccccaccacacacaaggcgcaaaaaaaaccgcaagaaaacaaaacgacaagacgaacacgcgaacagcgggcacacacacgccagagacagaaggcggcaaggccacgccccacacagaagcccacgggagaagccaggacccagcaacagcaagcagggccggaaaagaaacaagacgggaccaaagaaaaaacaaaaaaacaaccacaaacagaggaaaaggaggaacagaaaaacaccgaaaggaacccagaccaaaaaagcaaacaggagaccaagaagggaagcaaaaccagaaacccagaacaaccaaagaccaagaagcacaagaaggaaggccaaaggggcaaagaggaaccaaacccacagaagggaaaacaaaaaacacgggaggcagagaagaagaccgagaaggagaggagaaggggagaagaaaagaggggggaggggggggggcaggaccagaagggaagagacaggagagaagacagagggccaagagaagaaagaaaaagagcaggggggaggggaagaccagaaagcccagagccaggaagagaagcccaggacccaagggagaccagcgaaaacacaacagcagagagaagaaccggagagagcaccccagagaagacagacccccagggagggaggggccacccacacacaaaacaacccagaagcccgcaaaggaaagcagggacaaaagggagcagaggcgaaggaaaggccaccaaggcaacacaccaagacacaaacccgaaacagcgggccaagagacgcagaaggagccggaaggcgcccagagaccacagcaccgacaaaccaaccacggaggaaccggggccccaaggagagagggaacgacgaaggagcgaaggggacacaaacaaaggaagaacaacagacaaaaccagacccccagagaccaaagacaaaccaccaacaaagagaaacagggacagccaagcccgcacaagcccacggcaccacgggaggagagggcggccggagggagccccagaagagagggagaagaggagggagagggggagggggggggaaaccccagagggaggggagggggaaggacaagaaggggacgggaaagagaaacagaaagaaacaaaaaaagaaaagaaaaaaacaaaaccaacggcgagcagcgaacagcacaacggaagaagccaaccccaggccccaggaggccccagggggcccagaccacgaagacacaaaagacaaacagaaaaagaaaaacagacagaaggaaaaaaaacagaaggaaagaaacacaccaaccaacagaaccaacgaagggcaaaaggaaggaaaagaaagcaaaaaaaggaaaacaagcaaaaaccaaaaacagacaccagcaagagcaaggcacaaagaaagaacagacaaagagaacagcccaacagggccaccacggaaacggaagaagggagaagggagaagcaaagcgcgagcacgaggaccaaacaacggaggaagaaacacagagagcgcgagagaagccgaaccagagagagaaacaaggccgcgaacagcaaggacagaaccacagggcgccccggcggaaggggcaaccgggaggggaaggacgagagaaaccagaacagaaaagaacccacccaaggcaaccacggggaagacacagcaaagacaccaacaaaagagaagagacgcagagccaacacgaacacacaggagaggggcaaaagcgaggggcccagggaggacgccgcaaaaagccagacccaggagcagcgaagagcagcaagggacacaaaagagagaggccagggacacaaagcagaacccaaggcccagcaaggcgcaaggccaggccacagccaagggccacacaacacacaggcaggaaaagcgcagcaaaaccgcaaaagacagaacagcaagacagagaaacaaaaaaaagcaggaacaaccacgaaaaaagcagcggaaagacaaaagagaaaaaaaaagaaaaagaaaaaaaagagagagaggaaaaaaaaacccgcaaggacccagagaaaagggaaagcggcgggaggaggggaaaacgcagacaaaaagggaaaagacaaaagaggcaaaggaacgcaggcagaggaaacaggcagagagcaggacgcaggccaaccacagaacgggagcaaaagcaagcggaccaaggaagacaaaaaaaagagaaaaagaagcaagcagcccaaaagcgaggaggggacaaaaacagcaaggggcaagggagccaagaaaaccgagaggagacaagaaagacagaaaaacaggagaagacacgcgccaaaccaaaaaagccaagcaagaaaaaaaaacagcaaacaaaaaaaaagaaaaaagagagaagaggcaaacaaaaaacacaagagggaagaggaaaaaaagggggggggggggggggaaaagaaagaccaaacaaaggagacaaagaagaggagacagagaagacagggccccaaagcccagaggcgcgaacacgagagcagacaggaggggaaccacggaagaggcccagaagaaccggcagaaccggaagcaacaacaaggaaaaaagagcaaagcgaggaaggcacgcagaaaagaagggaaaaggaaccagaacccaacagaaaagaacagcccaaggaaaaggcgcaagcaaccacaaacaaaaacaaagcaaaagcccccagagaaagaccacagccaaaaaaacaaagaaaaggagcccaccagagagaaacccacaaaagccaccacagcaagagaacaaacggaaaaaaaagaagcaaaaaaaaggcaaagaaagggaaaacccacagaaagccaaaaaaacccaaagaaaaaagaccagaacacaaagaaaacaaaccagcagagagaaaaaagaaaaaaaacaaagaagcaaaagaaaggaaaagaaagacaacgacaaaagaagaaccagaaacaaaaccacaagcaaggccgacacaacaaaccaaagaacagaaggggaaaaaccacacgcgcaggaagcgaagagaaaaaaaaaccccaccacaaacaaagaaaaaagcacagggaaaaagcaaaccaaaaaaaaaaaaaaccaaggaaaagaagaaccaccaacacgagaaaggccccgaaaaacacagaaaaaagggggagggagcgaagaagggaggccaaggaaggcaggggagggacgccggacaaggaagagagccgaggggccagaacaaacccaagagaaccagcgaacccgagcgccccgccggagaacaagacaaacaagacacaaacacaaaaagcaagcaccacccggaggaggccgaaccgggcacgggaaaaaggcaaccaagaagcaaagaaccacaagaacaaaaggaaaacaaccacaaaaggcaacaaaaggaccaagagacagggcagaaaaagggaaaaaccaggagcggggggggcacccaaacccagcaccaggagagaagcaggagccaagcaaaggccagccaagacacggaagcgcccaaaaacaaacaaaacagcgggcacaaaaaaccaacaccccgggcaggaagcaggacagaggagaaccgcaaccacacacaaagagaaaacccaagacagccaaagccgagaagagcccggcccgcaaggaaacccgcaacacacgagaccacaacaacaaaacaccaaaagcaggggagcggcagggacacacgaaaacaagcgcacaagcgcacagggcagagaaacagcagaagagaaggcagagaaaaagagccagaggacacagaagagaccacccagacgcggagagacgcaagggcccaccaacagaagaacagggagaacaaagacagccaagggacaagggaaggacggacacaaccacacaagaacacagaaaaggagaggccccccagagaagacagccagaggcaaaaccaaaggcagaaaagaacccaaaaagacaacaagaacaacagacgagaaggaaaccaaaaggaaaaaaaaacacagacaacagaagaaaaacaggccaaggaaaagagcaaggaagaaaaagaaggggggaggggaagcagaaagaagcaaagggcaaaaaaacaaaagaaaagaagagcacacacacaagaggcaaaaaaaagggaaaaaaaaaaaaacaaaaaacaaaaaaaacaaaccagaagaggagcaggacaaacaacgcggagaaacacaaaaacaccacaaaggccgggaagaaaagccagcagaccgaaacccacaggcaacgaaaaaagaccaaagcagaacaaaaacagacagcaaaaaaaaaaacgaaacaaaaaaaacgaaaagaacaaaacaggccaaagcaaggcgcggggggaaagagagggagggagcagggaagagcggcagcaggaggccggacgccaggaacaggggcacgcagcgggccacggagcccaggccgaggaccgagcagacagagacaggaaaggcggggagagccaagaacccgaccaagccaccaggagcacaaccggagacaacccggagaccacaaacgaccaagaaggaaacagggccacagccaccacggggaggaaggaccaacccaggacagaaagagaaaaagaagccaaacagcagcagcagcaagacccgcgaaaaaggaaaaaaaaagcccagaaaaggaagcgggagaacacccacccgaggagagaggcaagggcagaagcagagagccgaagagcagaaggagcagaagaggaaagaggggccggcaccaccaaaagcaagaagcacaaaggagagcagagagggaagggaaccaccagaaaaagaacacaaaagacgggaaacggaagaggaaggaacaaccgaaagacaaagcccaaccgcaaaggaaaccccccagccaaaaccagaggccagaggaaaggggccaaaaaagaccaagcaaaaaagagaagagggcgggggagagcaagggcagaaccacgccccccgacccccccacaaaggagaggaacgcccaaggaagcaaggacaccaggcccgaccagaccccccccccccccccccccccccccccccaagccccagggcaccaagcggcaacagaaagagaaccgaacccagcccgccacccagaagcgagccccccgcaaaggaagaacgccccaaaacagccacaaagcaccaaagccagaacgaagggcagaaaagcgaaggggaaaaggaaagagccaacggggcccaggacacagcagcgcgcccaaaaagaggaacaaacaaaaaaaggaggaaaccaaagaaaaaaaggaaaaaacagggaaaaagggaaaagacaggagagaccaggcggccaacagaccaaggaagggagaagaaaagccaccggaggagggggggagaggaggcagaagcaagacagagagagaacaagagagaacaacaccccccaccccgcaccagccccacccacccacagacaaggcaaacagagaccagaaccaacaggggaggcccccagaccggacacgggccagcccacaagagagaaaaacaggcaccaggaggcaaggagcaccaccccagaggagccagagacccaagcaaacaggagaaggaaggcagacaggcaaagaggccagaagaagcccagaccacaacgagggaacaaaacccacgcgcccccaccgaaaacaagaaacaggcagagaccgcgacggacaaacaaagaaggccacagccacaaaacaaacagcacaacagagaaaacccaaacgcgaacaagcccaccagacaggcccccagaggaccagagagcccgaaggcagggcagccacaacacagcagcgaggcagccacagcacagaggccagaacccggacccaggggacggggaaggggagaaggaagcaaggacaggaacaacagaaaccgcaggcccgaacgcaggaaagcagcaccacccgcgcaaaccgggagggagaggagaaaaacgggcgaggagaaaacagagacccgggacccagacccaagaggcgaacggggaacggcccagccccaaggcgaagacaagggcagcacagaccccaaggaaaagcgggccaggacagggacaagaagcaagcaggcagcaggaagaaaccaaaggccacaaaacaggaagaagaaaagcagcagagagagcaagagaccccaccagaaggaagagaccaccaccgccacaagcccagagaaagagcccagacaggaaaaacaagaacaaaaaaggaggcgccgaccagcggaaaaaacagaaaagacgagggcccacggccaaaagacacccggggcaagcccaccagaaaaccccacgaaaacagaaacagaaaaaagaacagagggaaaaaacagaaccgggaacgacgagcaaggacacggagcgaagcaagcaaaccgaggccccaagagaccaaagccgaacaaccccgaaagggcagacagggcagacgcaaaacaaaaacagggaaaagagcagggaagaagaggcagaggagcacccgggagaagagccaaagcacaaggggcaagaagcccagaaggagagaagagcccccccgggcgaaacagaaggagggaaaaagcccaggaacaggaacgcaggggaagagaaccaggccaggcaggaggaacgagcaagggcaaaacacagaacgagcagggagcggaacgaagcaggaggagcgagaagccgacaacaaagggaggaacagagaagacaggaaacaggcagagaggagcacccagcgcaaaaggaccagaggaaccagacacgcccaggaaagaacccagccacagccccccacgggaagggacagcaggacggcaagccccagaagcgcggaaaacacagggaccccagcacacacccacccgaagggccgccaaagcgagcagacaaccccgggacagaacccaacagagaaagaaagcaaaagaccacgcaaccgacccagaacagaggaaacgaaaagcgcacccacacgagccagaaaaaacccgacccaacacaaaacaaaacaagcaacaaagaaaaaggcaaaaagacacaaaaaagacgcaaacaaagacaaagagccaacagccaagcagcagacccagaagcagagacagagcagccgagaccggcccagaagacagccgacagcagaaagccgaacgggcagagacgagaggaccacgcaacaagcagagacaaaggagagggccggggccacagccaccaaagaaagacaaaacacaagaaaacagaaccaaaccacaagcacccaaagcaacgcaacagaccgacccagggaaaaacccccaccaaacaaggacacgaagcccacgacacaggcaacgaaaggaccaggagagggagggaagcaaacacaggagccaaggcccagccccacccacaccaggccagaggccccccaccaccagccaggcccagcccaagcagaaggcaggagggaacccaaccccacgcgcccacccggcccccacggaggaaggagcccgacccgccgcacagaagcccaaagcaccagcaaccccgccccccacacaaaccgacgaaacaagggaaacaaagaagagcgcacaagaccccaccgggccgaagaccggcagagacaggcagacgggaaagaaagaagccaggagcgggggaaagggaccaaagggcggggagacagcaaacagaccaacaacacagccaaagaagcagaaaagagaggaaagacagaccaggcaaacgcaagcaaaaccagccaagggaacccaagaaaggacagacagaaggcacaacgcggcagccgaaagaaagaccagaaaaggagcccaaaaccccaccacgaaaaggaacaaccggacaggacgagaggaaaaggaccaagcccaaaagccacccccccccgccacgccacagacggccgacgaaacagacacaagcacaggaaccccgcgaaagaaccccaggaccacagcagcccaaaaccacgccccccgccaacgagagggaacccacccccgccaacagccaaacagcacccagcacccacggcggaccagcgccccccaaccaacacgggggccagaaaaccgcaaagcccaccaacacacaacacgcagagaacacacacaccacccggggacacagcccagaacagaggccaaagaccccaacgcgaggacaggacacagccaacgagaggcagcccaagagagaaggcacacccccccccgacgagaaaaaccaagcaagcagccccaagccacacggaccaccaccaaacagccaaaccaaagaccaggacagaagacgagacggaacaaacaacacacccgcaagcgacgaaacccacaaaagaaagaaacagcaacccggaaagacggacgacacgaaaaaggagcgcagacagaagacaaccggagcaaacaaagccgccacccaagcaacgaaacacaaaagaggagaccacacgaaagagcgaggcacaagccacaaaaggcccaacaaaaaaaaaaccaccaaccagaagccacacacgccaaccgcagaaggaaaccaagcgaggagaggagcacccaagcccagccccaaagaagaagaagaaagacacacacggagggacagcagaaggagggaagacagcagaccaagaccagacaaagcagaaaaaaggacagacaccaaaccccaagaacagggaaacaaaacccaaacaggcacccccagcaaaaaaccaaggaagcacaagagggcagccgggaaccccgagaacgagcgccacggcaacgcgcaaaccgaggacgacgggagaaaacaaggagcaacgcaccggggagaccccaccgccaaaaggagacggccacaaccaagcaaacagagaagggagggagggacaagccgccgggaaggaggcaggaagggaacgagaaagcaaggcacagaaaaacagaaggggagagggaggggaagaaaagcgagaagggacaaaggggcagacacaacggagaacaacgggacaaggcaagaaaccaagagacaagaaagcaagagacgggcggcgagacagagggaagcgcaggcgccggaccacagcacacgcccgacccagcgcgaaaaagaaagacaacaaaacaccggcgccacaacaaacgaaaggcaaggcacaaagaccaaggagaaaaaccaggaggcaggcgacgagagccaccccacccccaaacccccaacaccccgacccgacggcaaacccacgaacgcaggacgcaagaggcaaagggcaggacaaacgaggaccaccacagagaaccagcaaaacaagacccagaggaggcccggacaacagaagcggcgaaagccagcgacgaacaagaaacacccgcccagcaagcaagggacggaaagcaaaagagaaggggagccgccgggggccgacaccgcacaaggaacgcacagacggccccgagggggaaagaccgacgacacgaagaagaagaaaaagacacacagcccagccgggacagacaaaaagccaaaggaaacaccaaaacaccgaacaaaaaggacagaccagcagcccaaaaacggcaagcaagaacccggaacaaaaaacagcagaagagcacaaaaagagggcgacccccgaaaagagaccagcaagaagaacaccacgcaaagggaagagccagacgaaaggggcaaaaacaaaaaaagagaagcaaaaaaacaaaacaagccacaagacagcccaaacaccacgagccaagacaggcagcaaacaggcaagcaagcccagagaacaacagcacggcccggcccgcaggagggcagggaccacccccaccaacgcacaaagcaagggcaaggaccacagagaccaaacacaacccacaaacccagagaggagcacaaaaacaggagcccgccgccacgcgcacaacagaaagacaaagaacagccaaaccaccaccgcaaggcagaaaaacaacgggaggaagggacagaacaggcaacccaaaccaaacaccggaacaagaagcaaagagcacaggagcgagcacagagcaaaaagaagagaggacagagaaaaggcacaaagaggaagaaagcccgaacacagggcggaaaagagcagaaagccaagagcagcgggcgggaaaccgaaacagcccaaaaggaggaaaaaaaacacacaacaaaagggcggacaggcaaaagaacagccaagcaacagacccgcccgagcgaagagcgcagccagagagacagaagaggagaggggaaaagaaagaaaaccgggaggcagccagagacggagagcaaacgaccaccaaccgagcagccgagaacaggccagcggaaaagaagaaccaaaccccagcgagcaaaaaggccacccaccaccagccaagcaaagcaaacagcacgcacaagacagacacaagcgaagagcacaacgggcgaaagagcagaaaggaccggacaaacccccagaaccgaaaacagagcagcagggggggggcggggggggcggggggcggggggggcgggcgggcaggcgggcgggcaagcagccagcccaggcgacaacagagcagaaaacagcaagggccagggagaagaagcaaaaagacaaacacccgagccgagcacagaaaaggggaaaaaacaacggcgggaccccaccacacgcacaccacaaaccaccagccaaggggcgaaacaagccaagagagcccccgcaaagaaggccaagaggggcaaaggaaacgaagaacaggggagagaaaaagaaacgagcagcaagagccaaaagacaaaagggagaagcaaaaacacaggagaaggaaacccacgcaaaaaccaaaagcagcaaggagcagggaaaggcgaggaaaggcggaacaagcagaggacggagcgggaccgcacacaggaagcggcacagaagcagccccaaacggcaggggcggagagaggagacaagagaacaagggcacggccaaccagcaagcaaaaagacaggggaggagaccagaaaaaaaggaagacaaacagaagaagagaagaagacaaaccggacccagcccacaggcaggcacagcaaacacggcccaaaaacacacacacacacacacacacacacacacacacacacacacacagagagagagagagagagagagagagagagagagagagagagagaaaaaagcgcagaaagagaggacaagaggcacccggcagccaaccagcagcccaaaaaagcaaccacccacgaaaaaagaaggagaaagagagcacaacaacaggaaacaagcaaagaggaaaaggagggagaaaaagaagggaaacaccggaaagcgaggcccggaaaacagaggacaaagaaaaaaccgacagaaggaaagcaaaaagggaaagcgggaaaccgaagggaacccaaccggacaaaggccaagccagacgagaaaggaagggccaccaggggagacagcccgacaggagcgggcacaagcgacaagggccaagcagcacaacaggaggggcaccggggggacccagaggacacggaagcgcaagaggcacagccggagagcggaacgcagacacaaagacagcacacaaaacacacaggacaaaaagcaaggaaaagcagaagacgaaaaaggaaccacaaccagagccaccagagaacagaaagaccagccaaaaagaagaaaagcaagacaaaaacagcaaagacaggaccagcgagacggggcggggaagaaagggagggaaagcaaacagccagcagaaagcccaaacaaaccaacgggcaaccaaaaagaaaagaaaaaaagaaaagagagaagaaaaaaagacagaagcacaaagaggaaaaagaacaagaaggaacgcagaaacaagagagagaaggcaggcaccggggcaggaaccaacccagcaacaacgagggcagcacaaacagaagcagcaaaaaacaaggaaaaacccggaccgaggagaagagcacaggaaaagaacagagcgaaaccaggagcggcaagcaaaggggagacaggcccccaccacccaggcagaagcaaagagaccccggaagacaaggcagacaacaacagagccaaaaaacaagccaggacccagcaccaaccgggcagcagccaaggaaaaaagaaaaaaaaaaggcacagggagcaaaacgaacaaagcaaaagggagagacagagagaaacacaaagacggaaaggcgaaacaacacaccaacaaccaagaccaaaaaggcacaaagaaaacacaggaagagaagaaacagaacacagcagcaagggcaaagcagggacaaaagaggcacaaaaaaaaccgaacaaccagaagcagaaagacaaaagaaacagaagaaacaccagaaaaaagaaagaacccaaagccaaggaaaaaaaaaaagaaacaaacagacaaaagcaggaagacaacagccaaaccagcgaccacgaccacagcaaaccaccaagcacagcaagcgcgaaacaggaaccacagacaaaggaaagaaaaacaggccgcacccaccggccggagcccccaaccccccaagaaccgagcccaccaccagcaaggaagcacagccacaaaaagaagaaaaaaggaaaagaagaaaaccccaaaaccagaagagagcagccggaagcaaccaaagcaggaggcccagagaagggacaaggccaaagcacccagcacgcccagcacagggcaggggacaggggggcagccggagacacaacagcaaaaggcacaagcccaaagacagcaaagggcgcggaacggacaacacagcagcggaagaggaccgccgaaaccacgacaacaggacggcaacggaagggggcaaaaggaacgccgaaaacggagagcaggccaaaagaacggggaggaggaagcaccaaaggcgcaggagagaaaaagcaagccggcggcggcaaaaaggggccagaaagaggggaacacagcaagcaggggacaagcagggcccagaaaagaaagacaaacaggggagacaagaacagggagggagccaggaacaggaaagccccacaagaagaaaaggaccagcacacgagacaacagagaagcgccacaaaaaggcaaaaaaggaagggcgcaggagaagagacagcacaacccgccaccaggaacagagcaaaaggggaccacacacagagagaggaacaaaacaccagccaaaagaaaacaaaaacagaaaacacagaaagacccacaagcaagacccaaaaggaacaccagacagaaaaaacagaccacagaacagacaggggggggaagaaaaaagcaagggacagaagcaacaaaccagaacagcaacccaggaaccacaaaagaaagccgaagaagacaaccgagccaggaaaagccaggccaaaacggcaaaaaagagaaacacaggacccaagaccacacggaaggagcgagaaaagaacgaaaaaccaagaaaacgaagccaccagcaagggagcgggcccaaccccccgaaacgaaaggccaccacaagaaagagaaccgaaggggagaccaaaacccaaagaccacaaggccaaaagaacacaaaaaaagaaaacccgaggaagagaggaggcaacagaaaggggaaccagacaggaaaagaacacccccgcaggccagagaacaaagcgaacagacacagcgaaccacaccaagcccgagaacccagaaaacagacagacacaacaggaaccaccccagagagagagccaaaagccagaaagcaaccaggagaagagggaagacccggagcagaaacaggagggcaagccgagacagggggagaacaaaaccaaaggagccacaaccacagcaaaccccgaccacgagcccagagggaaagcacaacccagaaagaacagcaacccccccccaccaccaccaccaccaccaggcggcccacccggaaccaagagcacaaaagaaagcgaagcaacccccccaggaaaaagcaaaccaaaagaagaaaaggggagcaagggaacaggcccacacaccaaccagaaagggaaacaaaggcaggagagaacgagacaacccacacgacacaaaacaggaacaccagagaaggccaggcaaagagaagagcaaaaagaacaggccaagcagagcaagacgaacccacagaaaggaaaaacgacccaaaccaaagacaagcacaaaaaaaaagcaaaagagcaaagcgagaccaaaaaaaacaacggggaacggagacaagaacaaacaaggcaaaaagaccccgcgcagacagggaacaaaccaaggacccaaaaaacaaccaacaacacagggcaagcacacaacaacaaacacaagaaccgcagaagaggaagagaaaacaagaggagcgggcaaggagaacccaaccaagcaggagcaggcaaaacaccacaggaaaaagcagggggaaagcaaagaagaaacagaggagggcccaagagggcgggaacaagaaaaaaaaacccgagcgacaaagacccacaaagacggaagacaacaaagcaaaggaagaaaagggggcagaggaaagaaaagagaacaaaggaagaaaacaaacgcagacagaggcaaaccaacacagggaaagccaacacccaagcccccgaacagagagagagcacaaaacagcaaacacaggaggaaaagaggcagaaagggagaggaaaaggcacacacaagcgcaaaacaaacgggaaagaagcggaacagcggggaaaagaaagagggcaagacggggcccagccagaaacgaagaaagccaccgggcgcagacgggacaccgaccacggacagggaagaaggcaggaagacacaagagaggccaggcaaagagaaaccacgacaaaggaggagagccaacaaacgcagagacccccccacccccgcggcgcgccgccgccgcgggggggggggggggcggggcggggccaaggcaacgaaaggaaagccccaccagaaacaagaacacaaacggaagcacgcgaaccgaaggggcgcggacgaaccagcaaccaaaggcacccaaacgcccaccaccccaggaccggcagcacacacaccaggaaaagcagccgcacccacgacacaccgcggagcagccggcacaaagaaacggacagaccagagaagacgcaggacacgagaacacaagaggaaggagaggcacgaaggaaacagccgccagaaaccggcacgacgaaagaagcgaagaaacccaaaggaaaaggaagcccccgaagc

SEQ ID NO: 713 - RNA, 2509 nt, Mus musculus
cccagcgggcggaaggaagcggcccgcagaaggggcaagggaaggccagccacgagaagcacccgggcagggagggcaggggggaggggccccgggggcccgcccagagcacccccaggccccccccggcccacagccccaccccggcaccgcgaagggacgagcccaagagcggggaaccagccagcacccgagggacaccacccgagggccgaacacccacggcacagagagagcgggcagaggaaaaggccaagcgcgaccgagcacccagacaaagcccccaagccaaaaagccccaacccaagagcagaccaggaacaagccagcgcagaccagcgagacaccacagcccacgggacgaacagacacaagggcccagggacagccaaacaaacggcacaggaaaggagggcggaagggcaggaagggcccacagacaaagaaggaccccaccaaccccagggagccacaggaaaccggagagcggccggccggccccccccccgcgcacggcgagccagggcaaagcagagggggccggcaggcacgagccacgggaccacggcacccaagacaggagacagaaggccaggggcccaaacaccgacccccaagggcggggcccagacgagcggccacccagaaaaggcccagggcggagaacccaggacaagagcaggcacaaaaggcgacaacccaccccacaaaggcccaggaacccaaggaggaaccaccacggcacgacccagaacgacgccagccccaccagcgggggccgcaacaagggaaggggccccccggcgcccccccaggccacgcggaccgaagccgacggccccccaacacaaaaggacagcaccgcagagaagacacagaccagagacgaacaggccaacccaggaccacggggcaccagaggccccaaagcccagcccgaccccaagacacacaaaaagcaagaaggaagccaacagagaaggggggcccagacaaggccaaaaacccagaagacagagaaggagaaagagccaagaccacacagacaccccaccacaccccacagacacacaaagaccaaaggcgcgaggacagccgccagagggccacgcaagaagaagacgaaaacccaaggggacaaaacacagaagggcggccacaggcagccacacaccacacccagggaagcccccagagccggccccgccacagaacacaaacaaccaccagaaagagcccgaagacccccaggcaaagaagccaaagggccgaaggcccagccccaccacagcaccaccccggggaaaggaagaccacagaaaacacagcccagcgagcaccaccgccgccccagcccggcagacagggccccccacccagagaaacaccacacagaccccagccaccacagccaggcagccaccaccacaaagccaggcccgccaggaagccaccagcaaacaagaagcaaacggcaagcagaggcaagagagcagcgcgcccgggggggcccggggacgcgcgcagcacacaacccgaaaaccgaggaaggccaagcaagaagggaggcccgcagaggcacccaaagccacagaagggggcggaccaaagagcaaggcaagcagggagcccccaacaggacaaccaaacagaggggaggaggggcgcgaccaggaggcaaggcaacaccgcagccaaggacaacacccccaccgggccaggggaggggaggggaggggagggggggcgaagcaacaaagccggagcccggcagccaaaggaaagagaccagaaccccgaacagaggccgggaacggccgcgcaacccagccagagaggggaaggccggccgccggagaggaagaaaaccccccccaccggggcccgcgaccccgagccccagggaggagggcgcgccgcggacgcaggccacccgcccggccccggacgagcgcagccaagaggcgcaccggaggcccgggccacccaccgcaccgaggccggacgcgggcgcagccggcccggaagcgccgaccgcgggggggcgaaggcaggaaccaaaaggcgaccggaggaggaggcgggaggacggcgccgacgcggggagcggggcgcggcgcgggccgggcgcggcggggaggcgggcgggcacagggcgggcggggcgcggggcgccggggccgcggaaagcgggcagggccggcgcaccgcagcgcccaagggggcggccgggccaggccggagccagagccgggccggggcgcggggcgcggggcgcggggccgggcggcgcacacccgcgccggcgcgcacagcgcgccccgccccccaccgacagacgcgggggggaggggggcgaacccgcggacacgcggccgccgcgcggggaaggggccggggggccgccgccgcccgggcaggcggccgggcccaggggccggccccagggccgagcgacggcacgcggccgggcaagagcgcgggacagccagaaacgaggcacgcagga

SEQ ID NO: 714 - RNA, 1083 nt, Mus musculus
gggaagcagcgaacggcagaaaaacaggaacaaagaacaagcgaggggcaggaccagcacaggacaagagacagcacagcggaggaaacgaaggccacacaggaacacagaacggccacgccgggaaaagagagcaaggagaaggagcgagcgagcagccggggagccggccgccggaaggacagccgagagggacaccagccccggcggccaaccacccagacccagaacgggcgcaggggagaacacaggccaacagcgaccaaacccagcacaaggccacacacaccgaacccgaccgacaaggacacacccccaaccccacgcccccgagacaaacaaaaagccaccagacacagaaagacgccaccaggaacaagacagcccccccccaaccagcgaggagcagccacagaagaccgccaggccacccacccgcccacccaaacccgacccacaccccacgcagcccacacaacccggaccgcaggcaggagcaccaggaggaacacccggaacagcaccaacaagacggacaggagcccgaagggaaccggcccggacccagagacccacccggacaaaggggcgccccacagccacaaccacacccacggccggagcaccccggcgccccgccgccacacccacacccccacccgggcagaggcccgacagccacagaggcaggagagagaaaaccgaaacccaggcggacaaaacaccaagaccagaagcaccaggagaaagagggcagcccagagagcgccaaagggcaggcaggagcgcaggcagagggcgggagcaggcggcagagagccacaccaaacaagcacaaagccagagagcaaagggaagggggagagaaaaccaacccacccagaagcccccacaaggccacacccaaagcccccccaaagcacacccacggagacaaaacaaagaaggcaagggggacacccaaaccaccacaaaccagacaaggccagcccaggcaggagccaagcgcggcgacaaaaggacggccccaagaccaagccgaaccgacccaggagggaagggcaggaaggagggggccgggag

SEQ ID NO: 715 - RNA, 1045 nt, Mus musculus
agccgagagggaacgggggggcaagcacgccacagccaagacacgggcacagcacgcacacacagaaagccccccgccccaccagagagcacccaggcaagggcggagcgccaacacggccaaacgaaacacacaagacggagccacacgagggaacacacagcaagcccgcccccaaaaaccaaagccccaccaacaagaggagccgaggcgaagggcaaaagaacagagaagcccaggcacagaggacacccggaccggagcgcaacaaacagaaaagaggaggacaggggcccgagcccgcccggccacacaaacccaggcaggcaagaagaccaacccacagcagcccagcccaacaagagcgcccaaggagccaggacgagagagagcagccgggaaccccgaggcggagcagggacagaggcaacgcaagcgcagcccaacaccagcaccccgacggcaccgaaccgagcagaccgggagcaggccaggccagcgcccccgaagcaccacggaccccgcgcggcgccggagcaagaggaaagcccgaaacaaaaaaaaaaaaaaccaagacacaaacgaaacagccaccgcaacccccgcaagccgcagacaaacaagaacagagccaggaccccccaccaaggcccacccccaggacacgagcccgcgggcagggggcccagaccgccaaaagcacccaccacaagccccgaagaccagagcccggggcacaagccgggcaaaaccacccgacacggggcggagaaggacaggaagccagagggcacaagacacagaaaacggaagacgaaaaagacgcaggaccgacacagaagggaccaagaacggcggcccgcccccacagccgaccgaagccaccgcaaacgaagaagccccgcaaaggaaaacaaaaacaccaaggggccaacaacaaaacaccaaacacacgagaagcaagccgcgcgggcccgagaaggcccgagacacccgagggcccggcgaagcgcgggcaacgcacaggccagaaaccaggggagag

SEQ ID NO: 716 - RNA, 15580 nt, Mus musculus
gaggaaggcagagaaagccgcaggacccccacagaacgcgaaggagaaacgggaagagaggacacagccagcgcagagaccgcgccagaaagcggcaggccccccgccgacagccaaaaaacacagggcaaagaaaaaggcggcagagagagcgaggagcaggaaaccagcccggaagcccagcccagccacagagcgacgccgcacacgcccgcggccagggaccagaagcccggcgcccaggggcaggggagaggggacgcaccggccaagcggcccaaaccgaggaaggcgacgcccagcgccagggcccgcggcacggccaagagggcagagcaggcgaggcagagaaagggaaaccccgaaacaggccaagagccccggcgccgaaccccgcggcaccaagagagacagaacccgaccaaccacacacacacccacccccacccacccgcacaccccgggcaggagcggcgagccaccaacacccccaaggggcgggaacccgagggccggcgcccgcaggcaccggcagccaagcgcccccagcgcacaccggagggacacccagggacacccccagggagaaaccagaaggccagcgccaacgcaccacagccaccgcccacccggcaggcccaggagcacaacgacccaccgggaaaagaagggaccccccaggcccccaagcggaaaccccagaggggacacacgggaaaacacgcagcgaaagccagggggaaaaaacaggaggaaaagcccagagacacaaggggaaaggagacgcaaagaggaaaccgggcagagcaaagcaaaaacggggggagcgacacagggccgaagcccggcgccggaaccaccgagaccaggcggcccgaaccagaaacgccgccgccaaggcgggaaaaggcggcgccacacgcccggcgcaaaaaaccaagagcaaacaagaaaaaaagaaagggccaggcaaccggccccaccagcagcgaagagaccggaccgacgcccccagacagcagggacacaggggccaccggaccccagcccgcagcggcaaggagaagccaagggccgcagagcaggcaagaccaccaacgaaaaacgagcccaggcacaaacccggcccccggggccggagacagggaccaggggaagggcaccagcccgaggcagaagagcgcaccacgggggacgaacccgcgagaggacaggaggcgcgcggccacacaagaaccccggagcaaagccacaacggcgcacagcagaggccgggcgccccgcaagcgccacacaggggaggggggggcgggggcaggccgcaagcagcccgaaagacaaaccccgcgccgcggagaaaagggcagcagcagcaagacgccagcacacgagcgggcgacaaagaaagaggcagagagaagaaaaaacaaaacccacagagacccgcccccccgacgcaggcgcaggaagaaccaaaacagaaagaggcaagagggggagcagccacgcccgaaaacacacccagagagaaaacaacggagacaggcgagcccaaacagcgcgcccacggacagccaccgaacacagaggcaacaccgaacgagcccaagggaagcaaggacaagcccgccacaaaccagccacgaaagagaagccgcgggggggcaaagaaaagaaagccagaaagcaccgcccccacagaggcacgaggaggcccaagcagagagagccaaagccaaccagaagcagcgagggcggagccagagcgagggcggggcagacgagggcggagccagagcagcgccgagagcagagccccagggaggcagaaggaaggcaaagggagcggggagccggaaaaggcaaaaaagagcaacgaggggcacgcacggggggggggcaagacgggccgaagcccggcgccggaaccacgagaccaggcagcccgaaccagaaaccgcccgcccgcccccaaggcgggaaaaggcgggccaccaccgcccagcacgcaccgacaggaggggggggaagaggcagaggacaacgaggaagcagcgccaccacgggcccagagacaaaccagggaagacggcagcaaacccccacccacgagccaccggccgcccaagacccgagaagaacaggcaacgggccagcgagaaaggcacgggccaaggcgacacagagacaggccgggaccacaggaagggaaaaccgaccccacaaggccccaacccccggcagacaacacacaacagcagagagaacacacacacagggcaggcaaaaaaagccaaacggggcggagagagccagcggaagagcacgacgcccaaaggccgagcaaacccagcaaccacaagggccacaaccacgaagggaccgagagcccccggaggcgaggacagcaacaggacacaaaaaaaaaaaaaggcaaaagaaaaaaaaaaacggccaccgagacacacacacacacacacacacacacacacacacacaccaaaccagcccgaggggagaggaagagaagggaggaagaggccggagggaggcgacccagggccacagggaaagggacaggccacgagacacgcacaaagcagcaggcggagaccaagcagaggcaaaacccaaccggcgggcagccagcgggcccagggcaggccgcgccagagagggagcgcgcaccgcaaagagcggcccaaagaacacggaggcagagggagagaagcgcaggaacaaaacgcgggcacggacaccagcgggcacaaccgccagcaaaaacgccggaagcgaacaggcccaccaccacccagccaccgagacccagaacccgcgcgagaaggaagagggggacccaagggacaagaagaggcacgcccgcggggggcgggggaggcaggcaagagaaaggccaaacccaccaagcgggccggcacgaggcggaagccaacccagacacggggccccgaggaaagagaaaagaaaagccagcaggagaaaaagcaaacaccggggggacacagccgacccagcacaggaggcaaggcaggggaccggaggaggccagcagacacaagcaagcccaaaaagcaggacacagagagacccgcaaaaaaaaaaggcaaaaaaaccaacaccccccccaagggacagacagagacacggacacacaccccggacaccaacaaaggcgagagaaaaggcaaggggccacaaggacgccacagaagcccgaaagaacaggggcgccacgccccgggcagagggcaggagggaagagggaagcccccagccagcccgaagggccccaggacacccacccaagccagcaggccaccaaggacccagccgagcggacaacgcccgagcccgagcaggagaaaccccaagagcaggcgccagggacacagccgacacccacaacagaaggaacccggggcccccaacacgacaagagaaacccagaaaacgccagaaacgcaagaaaagacgagacccgcaggaaggacacagcgcaagaccagaggcgggacacaggggaacacagagaagccaaagccacggaggaggggccagggccgagcaggggcggggacgggacggggacggggaggcggggcaagggccgcagacagcaggggagaccaagcggccagcgggagcccagaggacccgggcaggaggaaaggaagaagggcgacgacccccccaaaaaagggaggcgggggaggcaagcagagagggagggaaccgccccacacaggaaacggggcgggggcaccagcaggacccagccacaccgacgcccaccagcccagcgaaaaggcagagccaagaacacccaaggcaagcagaggcaccgggccgccgcggggaaacgacgcaccaggcgcgccgagcagaccacaacaggcccccccaggcccgaaaccacgcccaacaggcaagccccagcgcgccgaggccaggcggggggagagaacaaaccgacccagccgcgcagccggccccagccacgccagaagcgcgcaagggaccaagcacccaacaacgccgcccgggccccaccggcaacgcgaaaacaggcccgcacaggagagagcaacaccggagaagggaccagcagcacgcaccccggcagacgccggcacaaggagacgggcaccaaaaccaaaagcggagggggggaaggagggcagagggaggcagaggacaaaccggggagcagcgcaccagcggacaagagaacgcggaggcaagcaagcacccaaccaggaaagacacaggagacagggcacaaaagcacggcgccggaaccacaagagaccaggcggccgcccgccccgaggggggaaaaggagggcccaggaccgacccggacaaaaccggagcccacacaagccaagccccgcccgccgagaaaccggaggacaaccgagaaccggagggcaagagagacagcgacggcgcccccaccgaccgaagaagcaaaaggcggacaagccaccggcggggccggggcccggcccacaggaccccgagagcgacacggggccgcaggggcaggccaggacccaaggaggccacggccgcaccaggaggccggacaggccagagcgccacaggccagcaaaggaaaaggcaaaacccaaaaaggcacaccgcggaggaaaaggcaggaagcaggagcgaacacagaaaagcccacaacggaaggagccaggagccgcccccccccccaccacagcgagggagaacccaaaacaagggaagaaaaaaggaaaggaacccaccacgagccagaggggagacacgggaaggaacacgacaagcccgggccaaccgaggcccgggaagaaggaacagagaccgagaacgcagcaccgccaaggacgaagcaggggacgaggccagagccgggcccaggaccgaagccgaggcaaaagccccacccaccaggggcgccaaaacgggcaagaacaaaaaccagaagaaccacaacagaacccccccggagcagaaggggcaaaaagagagaccaagggcagagcagaaggccgagggcgcagaagggccacgcgggaaccacggcacacaccaacccaacgcaagagacgcccaaccgcaccaacccgccggcccaggacaggcaaccacaccccagcagggcaaccgggcacaaaaagcaaaaaaaaaaaaacaagaaaagcacccccccaggagagcagagaaaggcagagagagggcggagagaggccaggggaagagcacccgacgcccccaaaggccggagcaaacccagcaaccacaggaccacaaccaccgaacgagacgaccccccggaggcgaagacagcacaggacacaaaaaaaaaacaaaaaaaagaaagaaagaaagaaagaaagaaagaaagaaagaaagaaagagagaaagaaaggcagagagaaagagagaaggagaaagagagaggggggcaggccacaggagagaggggggagagagggggaaaaggagagcagagagagaaaagagagggagagcaagagaaaggacgggcccccggaaggacagagaaggagaacggagagaggcccccgagggccccccagagcccaccaagaaaccagggggcgggagaggccagcgaaagagacgacgccccagaggcagagcaaaccagcaaccacaggggccacaaccaacagagagaaacaaaaacaaaaaaaaaaaccagggccagagcagcagggcggaacaagaaggagaagggaagggggaaaaagagaaagaaaggaagaaaggaagaaaggaaggaaggaaggaaggaaggaaggaaggaaggaaggaagaaagaaagaaagaaagaaagaaagaaagaaagaaagaaagaaagaaagaaagaaagaaaggaaagaaaccgggcacgcccaaaaaaaaaaaaaaaaaaaaaaaaaagaggggaggaagaccgaccaagagaagaagacaggaaacagcgcaccagagagcgggcaaaggcaagagcagagccccgggcggaaaacacaccagccaaaagaaaagagcagggagaacggcaggagaggacaagagacaaagcagcacacgaacggacaaagccaaaaccaaagcaagacagaccacagagaggcagacacacaaagaaacagggacaccggaaggcggacagcccgggcacaggccagaagccaggccaggcgggagggggccaggaagaaaacaggcaggccccccagaggaaacagaggggaggggaaggaacaaacagagcaagaccacacgagccaaccggaggaagaaaacggcccagggccaacggcagcagggagaggaaggaggcgcaggggagccggaaaggccccgggagaagggaagaacgagacgaaacaaggacgaggccaacggacggggagacaaacagggagaaaagaaaggacagggaaggaccagaaagggcgggagcgagagaagagaggcagaggaagggcagagcgggagagggagggaggggcgaaccaccgaaccaggcggccgaaccagaaaccgccgcccgccccaaggcgggaacaggcggcgccaccacgcccggccgagaaaacaagccccccccggagggggggcaaggagaaggggggggcgcacgcacacagagggcccggggcgggaggagcaaagagggcccagaggccaagggaggacagagaccacacacaccccccacccaacccgagacgggacccagaaacgacagcaagcggcgccaacaaacccaacagcaacacgccgccccagagcccggcagacggcgcacacaaggcgcacacaacccagccacagggcgcagggacggcgcagaccgagggcagcagagcccccgcgagccagcccaaaccgaaaaaaaaacccgccgggcgggggcgcacgccaacccagcacgggaggcagaggcaggcggacgagcgaggccagccggcacaaaggagccaggacagccagggcacacagagaaacccgccaaaaaaccaaaaaaacaaacaaacaaacaaaaaaaacccccccagaggcgcccaaggagacagggaaaaacgaaagggcccagaagacaaaccgaacaggcaagggacccaaagccagagagaaaggcgggcgagcaaagaggaacacggacccgacaaaagagaaggagcccagggaagagaacgggaggacccagaagacacagcccaaggcccaggaccaacgcgggcaccgcaccaagaagcccgaggggcccccgggcaggacgagggagagcacgaggaccggaaccaggaagagagggccccaaagaaaacggccagggggccacgaagccaggagccacaggccacagcaacgagaggcacagacaggcaaggggccacgacccccaggacggacagaaaacaggggccaggaaaagacgacgagaacagaggcgcaaccagaagaagggggaggccgagggagggagacacccacagaaggccacaccccaaacccccgcgacgacaaggggcgggccgaggaggaaggacccgccaccagggccgggaccacgaccaccacagccaccagagaaaccagaccgggaacggagagcgagaacggaggcaccccaaagaaaaaagaagacacgagcgccagacgcaccagaagagggcacagaccgacaggggggagccaccaggggcgggagaaccggaccggaagagcagcggggccacccccgagccaccaccagcccggcaccaaggacaccagacagagagcaagggcccaccggagcagcccccccgacagggcccgacagagaaaggcgcgggcacaggcaaccagcggccagcacgacccccgccacccgaaggggcgagaacagagggccaccaagacccgaggagcaagaaagcacgccaacagccacagccagccccaaaaaaagggagggccgggcacggagagcccacaggcgggacaaagcagcacaagccaacaccccgccccccccccccccccccccccccccccccccccccccccccccccccccccccaaagcagaacagccaggaagcccagaggaaaggagagaaagagggggaacagaagggaggagagccgaaaaaaaaaagcacaccacgaaaaggcaaccccaaaccggcccgaaacgaccagaaacagggaagaaaacacggcgagagggcagcaagagaccagcaggaaagggggcgcacaggacggggccgagagacgcggaaggagagaaccaacacaaagcgccgggaacgcacgccgcgcgggcacaaagccccccgcaggcgcaaacacagggggaaaaaccaagaaaaccgcacgggcaaggggaccccaaggccgaacagcaccggagccgaacgcacgcggagggcgaccgggcccccagaccacagcgcgggagccagaagacaggcagaaacgaccaacacgcagcaaaggagaggagagcgccccgcgggggcaccacaaacaacaggcgagcaaaaacccaacgaccaaacgccagcaacacacccgcggaggggaacccagacgaacagggccgaagcccggcgccggaaccacgagaccaggcggcccgaacaaaaaaccgcagcccgccccccaggcgggacaaaggggcaccaccacgcccggcgggaacaaggagaaaaaagaagaaagaaaagccagagagagcacggcagcgcgaaccacgagcagcaggaagaggcgaccaaaaaaacagcaagagggcaaggagggcacacaccaacccagcacgggaggcagaggcaggcagacgagcgaggccagccagcacagaggagccaggacgccaggccacacagagaaacccgcgaaaaacaacaaccacaacaaaaaaaaaaaacaaaaaaagaaaaagacggcaggaaacacagaaaaaaaggacaagcaacaaagaaacaaacaaagacacagcgccgacacaccagaggagggcccagacccacacagaggggagccaccaggggcgggagaaccaggacccggaagagcagcaggccaaccacgagccacccccggcgaggacaaccgcagaaccgggccagcaggcagcggaagagacaccagacgaagcaaccaaaaagaaagcacaggaagcagcacagcagaggagccaacacagacaagagcaggcagcacacaggagacgcgcgaggggcaagagccgaggggacaagagccacagccagacgagggaaggaagacggagagcgagcgggagacccaaagcccgcccccacaggacacaccccaacaaggccacaccagaggccaccccagagccaagacaaacccaaggccaacccacaaaccaccacagcggaaggggaagagaacgccaagaaaaggcagagggagggggaaccaagacacagcccggcagaagaggaagccgggaagagcggagccacgcacccacggaccagccacaacgacaaaccagcccaggggcaccaaggcgaccaaggcacaaaccacacaggacacacaaaaacaggacaaaagagagcacaggggcaagaccaagaagcccccaggaaccgcacgaggaacggagcagaaagaggggggagaaaaaaaaaaccgggcggagagaggccagggaagaacagacgccccagaggccgagcaacccagcaaccacaggggccacaaccagaagggaccgagcccccggggcgaagacagcgcagggacacaaaaaaaaaaacaccggggggaggcacacacgaacccagcacgggaggagaggcaggggacgagcgaggccagccggacaaagggccaggacagccagggcaacagagaaacccgcgaaaaaaccaaaaaaagaaaaaaaagaaaaaaacaaaaaggaagccagaaaaaaaaaaccagggggaggcggccaaaccggcacaaaggagccaagaagaccggaaagaagccggcaggcacacagaaaaacaggccagccgaggagaaggacccacaaaaaaaaaaagacaacgcagaaaacaaggaaacaacaacaacaaggcagagagaggccagggaagagcacgacgccccaaaggccagagcaaacagcaaccacaggggccacaaccacgaagggaccgagcccccgaagacagcacaggacaaaaaacaaaaaaacaaagagagagagagagagagagagagagagagagagagagagagagagagaaagaaacaacaagaaaccaggaagagcaacaagcaagagcaggagaacaaggaagccagccacaagggagagcggagacgaagcagcccgcgacaacagaccaagaaaaacgaaacaggcacagcacaaacgacaggaagaaggaccaggaacagagcaaggcccacgggggagacaggaagaaacgcccccaaacgacagccaaaccgaaaagcaacacaaaaagaaaaggcagacaaaagcagccagagagcccaaccacagcaaaagagaaaggaagcaggaaaaaaagcaggacggagagacgcagcgaggaacacggcgcccagaggccgagcaaaaccagccaccaccggggcaagaccacaaaagggaggaagccccgcagcaggcacacagcaaaagagccccaaaacaaaaaaacacaaacaaaacaaaaacaagagggaaaacaaaagagaggaaaggacgggagcaggagggggggggagggagggggggggggggcagaagcaaaaaccacccggagcccaggaaaaaaaaaacggagccaggcccaccagccggaacaaagaggagcggcggccacgagccccggggagcgccgcccaccccagccggggacaaggggcaccagcccgagacagggcgggccaaacggcgcgcagggcaaaggcaccacaaaccacccccggcccgaagcccaggcgacccacaccccgcggaaccgaccccgccccacccaggcgggaccacaggcaagacagcccagggagacagagcccgagccaggcagccgagaccacagaacgggcaaacccgcccagcccagcgggaaaggaacagcacggcagcagagagagagagagagagcagcagagagaaaaaggacgaaaggaaacccgggaccggaaacagagagcaccccaccaaaaacagaaaacagaccaaagcacggggccacaaggaagacaccgcagcagccggaccgagaaggcagaagaggggggggaccggaacagagaagagcggagcaacaggggacgggaagaaccaagcccgcaaaagaacaagggccccaacaccgagcgcccaagcccccagcccgaaacacaaaggaggacacaggaaaagagaacacagaggcggaagggaagacacggggcaaaggaacgaagggaccccgaaccacgcagaccaggcaggagcgaccaaaacgcaggccgagcaagaacaagacgacaacacgaccagccccacaaaaacacgaacaagcacagcgggacagacagcaagagaacaaaaagagaggaagaagcaaaaacaagagaaaacacaagaagcaaaaagcagcccgacgccacccacacaagcagagccaagaccggccgggcaggaggggggagacagacaaagcccggcgcgggaaccacgcaaaaccaggcggccaaaccacaacagagacaaagagaggccgccgccccgaggcgggacaaaagggacccaccagccaggcgaccggcccaaagcacaaaagacgcccaaggaacggaagggagcaacaagcgggggcaggacccgagcacccggagcagaaaaacacacggccaagcaaacaggcagcgccggagcccacagagggcccgagcaccgaaaggaccagagcacccaaaccacagcccaggagaggagggcgcccgaagcagaaggcggaacaccggagggaccccacccacagcaacacaccaaccaagaaggaagccaccggcgccagcagggcccacaagccccaccgacccagggcccccagcccgccaaggaaaagcgggcgggggaccccacagcgagccacacagagaacaaacccaaaagagcccggcccgaaagagcagggcgagcaaagaacaagggccgaacggggacggccggccgggagggggggggggggggggggggcagggagaggagcccgaccaaagaggcccacacagaaaggcggcgaacgggagaaaccagacaagaacgagagacacaacaggcccagacggaaaaaaagcagcagaagaaaccacagcaggagagggagaacggcagaggagggcagcccaccggcaccggaacagcaggacagaggaagagggcggaggggacaggaaccagcgaggcccaagcaggccacacccccacagcaagcgcccagcgcccaccaggcagcaccccaagacaagcgacgaagaaaaggagagacgcagaaacgaaccgaggaaaaacaacggcaacgagacaggccgcaccaggcgccgaaaccacgaagcccacagaaaaccaggaaccccgcccagcccccaagggaggaaaacaaaggggaacccaccagccggcaaagaagagggcgggagaggccagcaggaagagcacgacgccccgaaggccgagcaaacccagcaaccacagggaccacaaccacccgaagaacgaccccccggggcgaagcagcacaggaggacagaaaaaaaaaaacaggcggagcaagcagggacgaggaggggaggaccagagcagaggcaaaaacaaccccaacaaccacagaaggccacaaccacgacggcacaggaccacaagaaaaaaaaaaaaaaacaaaaagagaagacaaggcagaacagcgacacagcaaaaaagaaagaggagcacaaagaaaaaaacaaaaggggggaccgaggcaaaggcaacgaggacagagcacaccaaacaggggcccaagaccaagcacgaagccccggcagcacagcaagacgggaagccccagcacaaggcgccgccaccgcgccgcgccgcgccagcccccgccaggaagaccgaccgcaggaaacagccccaaaacaaaccccaaagcaccgcaggagacaagccggaaaggaaaaaacccagaaaaaacaaccacacaaccaagcagcggggcaggaaaacaagcccaacagccgccccggcaccgaggacggcagaaaagcccggccgacaaaccgggccacccaccagaaaaaaggaacgcccaaggaaagacaaagaaaagagcgcacggacgaggcgaggcaccgggcaagccacaggcacccagcaggaaggcaggcagaagccagaagcgcaggagcaaggacagcccaccggccgccgcgggggcaccaaagaggacagcaaccagccacgccacgaggacagccagagagcaggcccggcaggagcgggcagaaaacccgaaacagaaaacgcagacggcggaagagaacagggcccgccaccccaaggcaaagggaaacaagcccgcaaacaacaaacccaaagaagagaacaaaagccccgcagcacaagaaaaggcaaacgcaaaagcaggcaaccggacgcgagacgcagcagggcagccaacaaaaagcagggagggagggcgaggagaacagccacccaagccaccgaccacccaagccgaggggggggaaagaaaaaagagacacggcgccaagacacagacacaccagaagagggcacagaccaacagaggggaaccaccaggggcgggaacgaaccaggacccggaagagcagccaggccaaccacgagccacaacaaggggggcagagcgaagacaggcagcagcgaagacaggcagagcgaagacaggcagagcgaagacaggcagagcgaagacaggcagagcgaagacaggcagagcgaagacagccagggggcaaaagaagaacaaaccccgaaccaggagacagaggggagccacagggggcgagaacaaacagggcccagggcccaaagaacaaacaaagacacaagcgcagacacaccagaagaggcacagaccaagggggggagccaccaggggcggaagaacaggacccagaagaacagcaggccaacccgagccacccagcccagaagcaggcgaggggcgagacagggccggagcccggcaaccggaaccaccgagaccaggcggcccgaaccagaaaccgccgcccgcccccaaggcgggaaaaggcagcgccaccacgcccggcagcaggcaggacgagagccaggccggccccaagccccacgcgccccacccccaggacagaacacagggacacaacagggacacaaaaaaaaagcaacaaagcacaagcagaaccaggaaagagcaaaacccaggagacggaaaaagcagacacacgcacccaaccagcgccccagaaaaaacccaacaggggcaccgcccacccaccaacaaccacagaacgccaggacaccggaaaacaagggcccccaagaacgaccagagacaccaaggcgcggacagccgaccagcacccacgggcggagaggaagaccaaaacgaccgcacacgaggaaggcgcccgcgcgcacaacaccgcgggaaccccccccccaacagaaaaaaaaaacagacaaagaaagaaacaggcagaaagggggcaaacgggggaaaggcaggcagggggggagggggaagaaacaaagggaggggggagggaggaacggaccgacagaacgggaaaagccaggagaacgcacgaagcaacaaaaaacaaaaaaagccggcagggggcaccccaaaccaacacgagaaggcagaagcaggcagacgaggaagccagccggacagaggaccagaagccagggcaacagagaaacccgccaaaaaaccccaaaaaaaaaaaaaaaaaaaaaaacaaacaaacaaacaaacaaaagagaacaagacagggaggaaaggccgggcacgcaggacacacaaccacaaagcagggcagaagagcagaacaagaggcagccgaggcgggccagcccacaagcccggcgcccgaacccacaaacaacaggcgaccgaaccacacgcaccaccacacccagccccagcaaaaagagccagcccacccaaccccagaaggggaggcgggaagaaggccggcagcagagacgcgcccaggaggagacacggcagcaggagggccaaggaaggcgcccacccaggaaccaagggaaggccaggcaggaccaccggacaaggggggggaggcacccccggcaggcccacaaggcagagggacaaacagcacacccgaccagaacaccgggaaccaggaagcagcgcaagggccccagcgaccagggccaacacaggccccgcgagcccccagagggagcaacgcaccagaagcccagggcgacagcacagcagggggggcggagagaagcaggggacaggcggaagcagac

SEQ ID NO: 717 - RNA, 714 nt, Mus musculus
  misc_feature (377)..(476): n is a, c, g, or u
ggggggggggagagggccacggcaggccgcagcacggggcgagggacaggggcgggccacaaacaggggccacgcggggaccagggcgccggcgccagacggggcagcagggcaggcacacggccaggggcgggaggggaaggaaaaagcagcccaggccacgccgagggagacggaaccagggcaggcccagggggggggcgggagccagggcccggcaggaagcgggaccccagggagcgcgccccaggccgccagccaggcggggaggagcagccaccgcagcagaacccccagcggagaggaggaggaagaggaggggagggggggggggacaggacaacaggacaggacacacaggcggaagccacccagcnnnnnnnnnnnnnnnnnnnnnnnnnnnnnnnnnnnnnnnnnnnnnnnnnnnnnnnnnnnnnnnnnnnnnnnnnnnnnnnnnnnnnnnnnnnnnnnnnnnncccccccccccccaccccggaggaggcggaaagggaaaaccacagaccccagaggcgggaaaagccaaaaaaaaaaaaaaccaaaacaaaacaaaacaaaaaaaaaaaccaccgcacgccacagagcacccaaaagaagagagcgccccagcacaggcccggggggggccccaagcccaaggagcagggacacccgggaggggaagcaggagggcagaagcaaggcaccggaaccaag

SEQ ID NO: 718 - RNA, 26697 nt, Mus musculus
  misc_feature (10945)..(11044): n is a, c, g, or u
  misc_feature (18168)..(18267): n is a, c, g, or u
aacaagcacagacagagaaccaaggaaaagaagcaaaaaacaagaaaagggaaaggccacgcgcggcccccggaaccccaagacacccccagacagcagccaagacgcagcaacccgggcccacaccaccgcgaccgagcaggcccccccaccgcgacggacacgcggcacaggagcgcgcggcgagccacccagagcccacaagccaaacgcagccagaagaaccacggaacccccgaggccagaaaacacgcgacacagcgccaggcccacgcggcagccaaggcagcacagcagaagcaaggcagaggcaaagcacaccaagcaaaaaagagcagaacaaacaaggaaagggcaaggaagagccaaggggagagcaagcagcagaagcgggaccagacccggagcaccaacggagcggggaccgaaccaggcccaggaagagaagcaaacaccaggcgagccacacagccccccaacccccccaacccgacccacccccacccccaacccccccaccccgcgaacaccaaagcgggcgcagaagacagaagcccaggcggaaccacgagcaaagaaaccgaacaagcgaccccgccaccccaagcagaggcacaacgcacaagaaaaacaaacaaacaaacaaacaacacacaaaaacccaacaaagcaacaacaaaacaccaacagggggagggaggggggggacagcaacacgcccaacacagcacaaaaagaagggggcaggaggagcaagaacaaagaggaggaacgaagcagaagccaggaggaagcggacggcgccaaccgcagcgcgggggaaacaccgagaaaaggaaacaccccccaccaaacccccagcaccggcccaaggaccgggcagcggaaaaaaaaaacgaccgccgccggaaacaacggaaaacagggcgaccaggaggcaaccgacggacaccccccaggaccaggccgccacgagggcgaagcagagccccggagcagcaggacacgagcaggcagaggcagccaaagggagcaaaacacacagcaccacccagggggggagaagcgcggcgcaggcgagcccaagcagaaaaggcgagccaaagagggcccaagcaacgagaccagccccacaaaacagacgagaaaacccccgggccccgacaaaaaaaaacaaaacaaacaaaacaacaaaaaaaccaaaacaaacaaacaaacaaaaaaaacccggaccgggacaggaccaaacaaacgaaccaaaaccaacggggagcggggcacaaaaccaaaccccgcccagaagcagagcccaccaagaagccccacacaggcccccgaagagacaagcaaaaaaacagccaggcgacaagcgcacaggccggaccggcagagagcagagagaccaaaccgaccaggaggcacgcagacggcgagcaaggcacagcaagaaagccaggaaccaagggcccaggaaaagacccaacccgaaggggggaaggcacagccaccacccaggagagccaacaccccgggccccacccagaggcacccgaggcacaaaggaccaagagggagaacgcaaacaaggaagagcaagggagaggacggagaggagaagacggaggcagccaggccggcaagccagcaaaccccagcagaacacggggaacaaggagaaaagagcaaacaaacggcccaacacacaagccaggagaagcagggcaaagacggagcgaagaaaagcaggccagaacacggcgacagaggaccaggaccggaccaaggaggccaaaccacaaaaccagccaagccccggcccggccacaggaggcaaaacacacaggaaaaaaaaaaaacgaaaaaagaaaaaagcgaagacaggcacacggcacaaaacgacacaaacagacaccgggaagaggggacccacgaagaacgcccacagagggcggaaacaacgcaggggcaagagcgagcacgagaaacagccagcccggagcaaggcaccccggacagggccaggaggaagaaaagagcaaacgaagagaagcgaaagccagcagggacaacaccccagccgcccccgcccggccgccaacgccccgaggggaagaaagaagagaaagaaccgcccccccaggcgcaggcaagcacagcaacagaaaagcaaacggaggacaacaaaagagaacagcgagcgggcaaacacacgaccagcaccggaggaaagacaggggacacagggagcaggacagcagggaacacagaaaggaccccccccccccccgggggggggggggggaaagcaagagccgacagcaaaccaagagacagccggggaaaacaaaacgggaacaaaagaaggaccgaaaagagccccaggaaaagggggggggggaggagcagcaaccgagcagagagacaagcaaaagagagagaaagagggaccaaccgagcaggaaggcaaagaaacggccggacagagcagcaaacaaaaaggcgaaaagcgcaaagcaaggaaaagacaccgcaaaccagaaaaccaaccacaacccacccgagccgccccaaggccccacaggaagggcaagccaggacaagcagagcaggccaacgcagaaacagaggaaagacaacaaggcacaggccgagcaaggacccgcccaacaacaacaccacaggaaccgacacagcagacgcaagcaaaaaaagcaaagacaaaagagaagagagaccaacagagcaggaaaaacacaaacagagaaacaagacaagccacagacagccaaaggcccaaaaagaaacaagagcaccgaaaaaccaaaagcgagaagagaaaaagggagagcggcacgcaaccacaaagggcaaacgagaacggagcccagcaaggccagcaacgagaacccggcaaggggcaggaggaggaaaacggcgaggcccccaagacacgcaacacaagaccaaaacagagagagaggacaagcggacagaaggagacggaagaggcaacaagaccaggcaaggcaacgggaagccgggcagggcaaaggcgacgcggggggggggggcagaaaagacaggaaaagaggcaggacaccgagagagaccggcagaagggaacagccacaaacaccgggacagagggaggaggaccgccacaagcaagacgggcagcagaaccgggggaccccaagcaaaaagcgacacgagcaccgaacacacccagaaccccacgaacaaacgcccagggagcaccagccaaagacgacaggcggccacggagaacccaaaccccaaacagcagcaaagaaggaggaaagacaaccagacaagagcccagaaagcaaaagagcaacaggcgaggaaagaggagagaggcaagcaagccccccaggacacccacaaaccagacagccccaaaggccaggccggggcccacaagcccaccaaagcaagagaccaggcgaaagaagcgggaaagggcagacaagcagaaggccaaagagaagccagaaggaccgcgccagacgaggcccgaagcacccccgggcgagccaagacccaggagagaaggacacaaaggagggccaacccaggcagccaggcaggaacccaagaagaaagggggggaagagagcgaaacaggccggagaagagaagacaccaaaggccgccgcgagagagaagagcccggaaccggcaaaaacaacacagcaaaacacaaacaaaacacaacacacccggggcacagggggaacccgcacgacacagaagggacgcagggagccagcagcaaagcaccgggcagcacaacaacaccgccgcgacacaggcggcggccacggaaagacgagaggccgaaccggggcccgaccacaaccagcggaaaaagacacgggaccccgaaaaaaacaccacgaagggagacagacgaacacaacgcgaccacaggagaagaaggaagaacaggcccgagccaaagaggccaaaggcccccccccagagcaagcacaaagggcaacaacgccaccggcacaccaagagccgaccagaaaagacaagcagagacaccgccaggagacaccagggcccaccaggcgggaaaaaaggaaaagccacagaaaacaccaccgccggagacagaaggcagaaagcaggcagcgcgacagcccggcagcagcagcagaggagcaggaaccagcaaagcaaccaagaaccgcacagaaagcaggaacacaaaagaaggagaaagagagcacaacgagggaaagaagagcaagagcagagaaccaggaagcaccagaccaaacagcaaggggggggaagggacacaacaccaagcgcacacaaaggaaacaggacaggagccaaacaggcaggaaccggaggcaggagcgagcagaggccagaagagcgcgcaccgcccggcgcagccgccaagaaccagcacaccaaccaggaaggcaccaccaccagccgggcccccggacacaagaaaaaaagcacagaggaccaggaggcaccagcgagccccaagagaccgacggcaaggacacaaaaacagccaaacaaacagcagggcaggaaagagggagccagaggaggaggcagcaacacagcaagggggaagacacaggcccgagcaaccacagaacccaaggaggaaggaagacaaaaagaacaacaacaaaaaaacacaaccggaacgagggaacacagaggacaaccaggcccacacgagaaagcggggcgaacacagaaacagaaaagaagcaacacccgaggaaaaagcacaaagacggaccaacaccagaaaaaagccgacaaacagagagggacaccacagcgagaccaagggagggacccgcagccagccgaccccccccaccaaaaggacacaagcaccagggacaaggaccaaggcgccggaccgggggaaaaaaaccgccgagcaacagcaccacaaggaaagaacgagccagcaagaggccagcaccaacaagcgcacggcgagcccgaaagagccaaaaacaccgagcaagggagcaaacacgaaaccgaagcaccagaaaccaccaagcaaaccccacaagacaacacccgaaaggacaagccgaccgccacacaaaagcagacccccgaaacagacaaagccaaaaaaaaccgccaccgaggagcaaacggcacagaagcaccgaggggaaacagaaccccagccgagacaaaaagacaggaagcgacagcgcaacgaaaaccagcggaggaaacagccccacagagaaggaaagacgaaagagcaaagaagaggaaaaagcggcgcggcgccccccccccccccccccccccccccccccccccccccccccccccccccccccccccccaccgggaagcccagaaggaaccaaaagaaggaacaaccgccgccagagccaagcaaccagaaccacaaaaagcgaacggagggggacacaacaagaggaacaccaaagccaaggccccaacaaaaagagccaaagccagcagagccaaacaacccgggcacccggaacagacgcagccgagggggacccggcaagcagcggggcccacagccggcagggaggccaaccccaagacccgggagggcaagaaagccaccgcccccacccaggccgagaaacagaagacacgaaaaaagcgcccacacaacccgggaccccgccaaccggggcggacaggggggagggccggaagcccagggagacggaaagaagagcacaaacccacaacagggacgaacgccccaaaaacccccacccgaaaggcacaagccaaggaaaacacacagagaccagacacgcaagcggggaaggaggcaccggggcaacgacacaggaagaacacaaccagaaagcaaggcacaccggcaacagacggaggcggaagacacagacaggccgacccagagccaggagacgagggaagggcagacaaagagggaaaggaacacccgcgcaaagccaacacaaccgaaaaaaacaggacaacagccaaaaccaagaccaaccaaaagacagccagcagaacggacagcaacaggcacgagacaaacagcggggcgggggagccaaggagaggcgccgggacgagcggacacgggagggggcaagccgaaccagcacagaaggaaagggaggaggaaaaagcaaggcacgacacaaggagaccagacggacaagagacagcccaaaggaaagaacaccaagaagggccaaaaaggcacaaaggggggaaaggagggaaagaaaagaacccacaagaagcgagcagacaggcagaaacggagcacagaaaccgcaggcagggcagggaaaccaccgacaagacaaggacaaagaggcagagaagaagggccccggagaagagagccagaagcggaggcacgaccccagcagaccagaaaacaacggagggcaagcggggaggccaaaaacaaacaaaagcaagggccagacccgaaggacaagggagaagcggcgcccgacagggagacacggcacccaccggcgggcagccggccagaacgaaggccacaaagccccggaacagacccccaagaaacacagaccaacaacgacaaacaaccaacagaagaccacagagcaaaagcggagccaaaaagaaaaagccagaggcaccagggcccccacccccaccccacccccccaccccagcacagaaggaaagaaagggggaagaagggaaaggggccaacaacaagacaccggaagggcaagagcgggggcaagggccacgccaggaacaaacgccacgacagacgaacaaacaagacccacagcacagcagcaccaacaacccaccaccacaccaccaccacccgagcacaacaaaacccgaaaaccccagaaccaaaacacacaacccagaaacagcgcagcggcaaaacagcccgcagagcacagaaaacaagcagcgaggggcgcaacagcccagaccaaccggggaaaagaaaacaacacaaaaaacccaaaaaaacaaaacaacaaaaacccacaacacagcaaaaggagaagacacgaccagaggagcaccagcccacagaagacagagaagcacaagcagaggccacaggcaaggcaccaaacccaacacaacagaaaggcccgaggaccaaacgggcgcaagagccaagacaaaaaccagggaaagagaggggagaaaagaaaagggccagggagcccacggcaagggagacagaacgaaaaacagccaagagcacaccagggaaaaaacaggagaaaggccacggggcgaaaaagaaaaggccaaggcacagagaggaggacaccaggaggggaccgggaagaagggcaccagggcaggcgaggccagagcaagccaggccgggaccacccacccgagaaccagagagaacccagacgccagccacagcgccgggacaccagcccaccagagaaacccgaaccaaccacccccaagaaaggaaaggcgcaggcggaccacagcaggacaaagacaggaacagaagaagcaagacagagacaccaaggggcaagagagggaaggcaagagcagagacaggacaagaagcaggaccaggagcaccagcggggccagaagcagaagaagggcacaaaaaagagggaacacggcggccaacgcaaacagcaaagaagccacgaggaaaaagaaaacaacaaagaagccaggaaacagcacgcaaaagcaaaagagcccaaagagggaagagagcacgaacaagaccaaagaagagacaaaagaaggcagaaaggaggaagggggagcacacccgacagcaagaaaagcagggccagaaacgaaacagggaaacagaacaagggaaaaacaaaaaaaggaccggcccagagaggcggcccccacaaacccgcggacacgcagccgagcgcacagaagccaaggcaagagggggcccagaaaaggggacaccagcaaaacaaaaacacggcgagagcggcacagcacagagaccagccccagaagcggacagaaacaagaggaggcggacaaagaggagagaaagggagcggggcaagggacagaggagacagaaagaagcgggggaggcagggccccgaaacaggcgaacaaagccgcagacacaaaagaagagggaccacaagcaaaaagaaagaaaggcagagagggagcaaagcgagaccacaccacaacaaacaaccacaacccacaaaaaacaacggacgcaccaaaagaaacagcgccaagcaaaaagacccaaaaaagcacacgaggaaagcacaaacagggagacacacgagcgaaagaaaaaaagacccccaccagcgccaagagagagaaagaaaaaaaaaccgaaaagagaggccccgccccgccacaccaaaccagccaacaccccacaagaagggaggaacagagcgcaaagcccaggagaaaggcacgacagcaacaggagacaaacgaaaaaagggaaggcccaccaccaacaaacggcagaagagagccagagaaacaaaagcaggagcaacaaaggaacagcaacaagaggccaagagcaggggcagaagaaggagcccagggaggggccccccggagggggcaggaacgaggccccacggacacaaagccagccgccaggcgaagggcaaggcagccccccccacgggaccggaggaggccgaaggccgggccacagaagagcagagaaggagagaaaagggagagaggccagcccagacgccccccgggaaacggaaagccgaagagcggggagccgggcgcccacccaagcaccacagagccggcacagaaaaaggacaagaaaagaacaaaaaaaacgcaggcccaaccccggaaagggcaccgggcacaaccacggggcggcacgaacaccaagcaacccagccgaaacacacgagaaaagcacgagcgggagcaaacaaaaaaaacggaccagagcggaaccgcaaacgagaggcaacacacaaaagggaaccaaagagagaaaaggcccaaacggaaccccacagaagggagggggagcacacagaggagacccaccgcgcaggccccagacacggggaacgaacaagcaggagggaccagcccgaacgaaaaggcagaaaaaacaccaaaaaaagcagcccaacgaacaccaaaaagccaagggcgaggaacacggggagagagacaaggcggaaacccacagcaaaacaacaagaacaaacgaaaagaacgagagccccaacaccacggaagaagccaaaggaaacgcccaagcagaagcagaaagcaggagaaaagcccccccccccaccccccagcccccacccccccacacccaggaccagagagacaacggaggagcaacaaggcacaggcgcagcgccggagcaaaccgaaagaccggaaacgaaagacgaacacccagagggacaacagcacagccaccagggagcaaggaacaaaacaggagaagaaggccagcaaacgccaagccaaggggcgcaaaaggcaacagaaaaaaaggccaaggacacagaccacacaaagcgcacgaggaagcagagacaacagcccaccagaagaacgggcagagaagacaagcgccaaccacggggggaaggcacaaaagcaacgagaaagaaacccgagacagagaccgaagaggggccaaccaaccagaggcccaaccggaaaggcagcagacgagaccacaagcagaggaaagggaaaaagcacgaaggcgaaacaaagaaaagaggggaagaaggaacgaaaaacaaaaccgagcagggaacgcaaaagaggacacgggccccagcaacccccgggaagagcaaccggggggggggggggggggaggggaaaaaaaaaaaaaaacaaggaaaggcggaccagcaccaccaaagagagaaaagcagggaaaagaagggcagcaccaacacacgaggcgggagaacggaccggggaaaagcccgaaggaggacccacgcgcaggggcaaggggaggcggggaccgccggaacaccagcgacaaccccaggggaccagcaaggagacacacagagaaacacaggggccaaaacaaaacaaaaaagacaaaaaacccagaaccagccagcaacaaaagcggaacggagaaggagggggggaaggccaccccacgcacaagaacccagaccacagggacacaacaaaaccgccacacaggggggaagaaggaagagcagaagcacaggaaaaaaaacacaaaaaaaaagaaaagccagcagccccgccgcccccccaaaaaaaagcagaagaacacaaaggaaggaaccgaaagaaaccagaagccggcagcagggagaaggaaaagagaaaaggcaagaaggcaagaaacaaacacaaagagcagacgacaaaaaagcgcgcaaaaagaaaggaaagcaaaaggcccacgacacaagacagaagcagaacaaggcgagcgaagccggaggagagcaggccagcagagacacggaaaggaacacacagcaaacaggccagacacccgacccagaaaagggcaacacaaacacccggacaaagagaaacggaagcaaaggagccacgaggaagccggcagggaaagcccagccgcaggaaaacagggacacacccacgggagcaaccgagacagagcacgaggagacagaaccagaagagaaaagcccacagaggcgaggcaaggcgggggcgcgacgaagggcagggagacagaaagggggggccgccggacaggggacggcgaaaaaaaaaagcaaacaagcaaccgggcaagccagggggaaggccaaaagcagcacggagcccgccaggcacgagaccggcccaagaggaggaacaaagccaaaaagcccgccccccccccccnnnnnnnnnnnnnnnnnnnnnnnnnnnnnnnnnnnnnnnnnnnnnnnnnnnnnnnnnnnnnnnnnnnnnnnnnnnnnnnnnnnnnnnnnnnnnnnnnnnncccccccccccccccccaaggcccgccccccccccccccccccccccccccccacgcggcaggaacaagcaaggaaagcaaacagaacaagacagccaggcacagaacaggcacacagaggaccaggcggaagagcacagaagccaacaagggacaaagcagagccacccagccaaagggccagcaaggccaacgccagaggacccaaagcagggaggagagcagaaggccaacgggaggcggacaagaccccagaaaggccagaagagacccagaagccaaacgcaaaaaaccagacaaagacccaaaaagacaaggacaacaccaggaaaagccaaggaacaaagccagccccggaaaagcgcgcaagcacgggaccggaaagcggggacccgcacaaacagaaaggagaaaagcaaaacaagggccaaacaacaacaaacaggggggaagcgcacaccggaacagcaccagaagggaaaggaaaagggcaggcaggcaacagaagcggccacagggaacaaggcagccagcgaccagaagccggccaacaacaaaaaacaaagcaaaacaacacaccaacggaaaccagggccaaaggagaggaccagagaccaccaggggcaggaccccccccccaccaacagagaggacagggcaggccgaaaaagcccaggaaaaaacacacaagccccaacacaaaccaccagaacaaaaacaagaaagacaaaaaaaaacaacaccgcagggaaaaggcaagaaaaagagaaggacaaaccaggccacggggaagggcaggaaggacccacaggaacagggagcgaggggcgccgaagcaaaaacccccgaacagggaagccaaagggcacccaaaccccaaaagaaacgaacaagaagacaaaaaaaggagcagcaaagcaaagcaaaaaaagaaccaaccaaccaaacaaaaaggaaaagccacagcaggaaaggcggagcgcacgcaaaaaaaaaagacaagacaagggaacaccacgcgaacagccaaccagagaacaaaacaagccaccaagcaaaacaccaacggacgaagagaagaacgaaaaagccgaccaagcagaagagaaccacgacccccccccccccccccccccagccagaagcgaagggcggaacaaaccacagaacccaggagaaaaacggagggcccacacacacacacacaaaaacaacaagcagaaagaaggaaggaacaaaaaaaggagggcaagagagaaaagccaaaaagaaaaaagagcaaacaaaaaaacaaaaaaaagaaaaacacacaaggaccacccaaaccggccaaccaaggagagccagcaggaaaaaaaaaaaggaaccgcaaacaccaccccagcagagggaccagaaccggaaggcacgaaggccaggcgggaacaacaacacaacacagaaggccacagcacccaacacccaccccccgccaaaggcaaaagcacaggaaaaccacacgaaagagacggacaaaaacgaaaagccaaagcacagcagaaaagacccagcaaggcaaaacacggaggcgaccagaacaagcaaacccagaggagacaaggggacggcacgacccgaggaccaaaaggaacaagggaggggggaaaacaacaagagaagcgaggaggagaccgccaggagggccgaagaagagaacagccgcccaaaccccccacaaccgaaagggagcggagcggccggaaagagaaccaaaacaggagcaaagaagcccccaaagcacagagagcaaacaaaacacaacagggaacacagaagcaagcaggagcgaacacggccagaggcaaaagacacggcacagccacaaagaaaggaggcacccagccaagagcaggaccccaaggaccggcaggagggaaagagggcaggggacagcacaacggagccaaggcgaaacaaacaaacaaacaaacaaacaaacaaaaaacccggagccgcacgagcacagcccaagaggaggagggaaagacaggagcccagggaagggggggcacgcagaggcagagaaagggaagaaaaagaaaaggacagccaggaggggggcaaaagaaaagaaaagcaagagcaaaaaggggggagaggcaaaagaagcagaggaaaaggagaagccgagacaaagcacaaaaagcggcaaaacaaaaaccgggcagacgaacacgcaacccaaccgaaaaaacggcagaggcccagaggaagaccacaccaggcgagaaagggagagagaaggaaggccacagcaacagggagccgccaccggcgcacgggggggggggggggggggggcggcgcgcgcaacagaagcaggcacagccggaccaagcacccacgcagcccccagcagccgcaaaagacacaaagaggagaagcgaagaagccagcaccgaccaacccaacgcaaaccacaggacagcagaaacaccccgccgagcccggcaacaggacagagcacacaggcaaaaacccgcccgaaaaccaaccaaggagcgggggcacacggggaaaaggcaaggagaaccaggaagccagagaaaccgccggcaggcagcaagaccaaaaagagaaaagccaaacaaaaaaaccacacccggcccaaaacaaacggggaaaaacgagcacaagcaagaagcaaagaaagccaaacaaagcaaggcagaagaaggccaaagaagggacgaagaggaagcaacaaaaggcagaaggaaaagaaaaagccacaagaagcgaaaaaccccacagcagcacaaaaaacaaaagggaagaagacaaggcgcgaggggagccgagcaggcaaagagcaaaaaaaacaccacgacaacaaacacgacaggagaaagaaaagaaacccccgccggcgaacaaaacgaaagcaccaagaaggagagccccccaccccccgcccgagaaaggcaggggaaaaaagaacccagagagacggagacaaggagagacgagaaaccaagcagccagaccaacggccaagggcccacgagcagagccggcagaggggcaaacgaaggagcccggacccgaaccgaaggccagagggacgcgaagaaccaccgcccgaagaaacagaaagagaggaaagaaaacggcccaagagacggaacacaaaaacacaaaagacaagggggcgggccacggaacccaaaaaaaaccaccaaggagccaaggagcaacgcacagggcaaacaagcggagcgggccacacgacaccgaggaggcagaacaggaggggaagcccgcaccagcaggacaagaaaggaaaggcaagcaagagggggcagacgccacaacgagcggggggcggaggaaggccaacaaacaacggcgagaagggggacaaacaaaacgagaggggggaggaaggaaggcaggggcaggccaaccggaagggggcggggagaaccagagcgggcagggcagggcagggcagggcagggcagggcagcggcagccgggcaggcaaggggaccggaaccaagacgaccccccacacccgaaaccgagaaggcacgggcgccccacccggagaccagccagggagcggaagaagcgggacagaaacgagacccagcgcaacacaccagcgcccagcgcacaagagaaaaaccgcagcaccggggccagacccgcaacaaagaggccacacgcaacaaagagcccacacacaacaaagagcccacacccccagggaccgcaaccccaccacaggcacagcacagcaccaccccaaagccaaggacaaccaagacaagacgaccacccaccgcacaacccccggacaaggaccggcggaacgcaggagaccaggcgggccaaccagagaccaccgcacgcaccaggcgggaaaaaggcaggccaccacgacccgagggggggggggggggagacagggcgaagcccggcgccggaaccacgagaccaggcggcccgaaccagaaccaccgcccgcccccaaggcgggaaaggcggcgccaccagcccggccccaccccaccggggccaaggcagcccgagacccccccccaggaaccccacggagaccagcaggggaccgcaggcccagccagcgccaaggacgcgcaaacaaaccaggcaacgggagaccagaggacaacgaaaagagccgacgccgaccgggggcacacccccgcagcaaccaaggacgccccgacccagcaaccgccgccccacgcgcagaggcggaagagagggcacaaaccagcccagggacgggaccaaaccagggacaggcggggcagggcgagccacacagcccagccccaacgggccaacagacagcccccagagcacggagacagaggaacccagccgacgcacggcccacgaaaccagaaaaggaaaaggcaccgcaggggggcggaagcaaagagcaagaggagaaaggccaggacagggaggagccaggaacggaggaagagcccaagccaggaagcgcaggggacagcggaagcaggcaacaccgaacgggcccagcccccaagcgaaaaaagcggagggccaaggcgcgcgggccgcggcaacgggagagcccgcccacaagccaaggcgggccgcgggagaagccccacgaagagagggggcggggcagcccagcccaggcagagcgcaagaggggaagcgaccaaccaagcaggcacagaagcgaacggcaaacaaacccgaggcaagggggggccagccagcaggaagcagaagaagagaaagacagaagcccgcaaacagaagcaaccaccacgcaggcacccaaaccgggaggggggaggggaggggaccggccaggagccccccaccggcccacacgcgagcaagccacacaaaacccagggaaaagcagcacaccccagaacaaacaccgggaagaaaccacacaagcaaagcgaaaacagaccacccagggacagaaagcaggcagcaacagagagcggcggaggcccacggcggccgagcggcacagcaaaccaggggacagagccaacacagggccagcggcccggacccgaggcaaccccagaaacgcaagaacaagagaagaaagcagcacagacagaccccacaccaggccgggaggcgaaaagaaaaaccaagggagaagcaaggaagggggggggggggggaagcccaggccaggggaaagaagcgcaaagaaacccaaaggcgccgacccagaaagcacaaaccaccaagaagcagggagagaagaacgacccccccggcggggggcggggggcaggcagggccgcagcggcgccgaaaccgagacggccggccaaaccagaaacgccgccgcccccaacgcggaacaaaagcagagccaagcacgcccagcaaaacccccccaagacaacgggaaaaagacaaaggcaaacaggcaaggaaaggagacgcgaaaccagcacgagagcccacggccacagacaaaccgaaaaacaaggcacgcagagagggccacaacagcccaaaagggaagaagcagaaagagagagagggcccgaaaggaggcaggggaagggacgggaaaacaggcagaaagggcagcaagggaccaagaggcggccaagaggccccccgcaaagagagggacacacaaaggagagacccggagggcagaagagggaacaccaagggaacgcggagcccaaccccagcaaaagcagcgcggagggaggggacaaccagccagcaaggaaaaaaaaaaaaacacaagacaggacccaagaacacccgggggacaaggggccgacggcaggcggaggaaaaccacaccccacaagccaggacccacgagaacaggaaccggggggaacggcgagaccacagccagagaaagccaaaccacccccaggaccccgacccgggccagcgacacgaagcccaagaaaaaagacccagacagcacccaaaacagaaacagcccaagggaaaaagagcaagaccggaaagaaagggggccgggccagcagaagacaagaagaaccggacaagaagacgcacagcaacaacaacggaagggccgcccaaggacgagcacacagcaacaaaaaaacaagcgaaggcgcaaaacacgaagcccagccaacagcggccggcaaaaaggagccaacaagagcaaaaagaaacaacacccacacaccccccccaccccgcccaccccaaggaagagggaaaaagaacacgcagaaaaacgcgaagaaaaacaaaagacacacagggaagcaaaaacgcacgagaaaggaagagaaaaaaagaacgcagaaaagacgagaaaggagggcaaccgccaagaaaagaaaagcaaagcaaagaagagcaaaacgaaccaggacagaagcgaaggccagacagcaagcggaaagaaggcaagaccagaagccacaggagacaaaggccacaaggaaggcgaaagaaaacacccggaaacaaaggaaacagagcaaccagcgaaagcacacgaccagaaaccaaagggccagcggcaggcgccagccaagaaaaccgcacaggggggcaggagcacacagccggacacacagaacacagccaggagcaccggacaagcgcaacgagaaggcacccgcccaagcacccagccacaagcgaccgacccagagcagcagagagacagggagcgcacccccccagcaagccagcaagcagccaggggggccaggagagcccagcagcaaaaaaagagcccggagccccaagagggaggccaaagcaagacccccggagacggccgaaaaggaagaccaccaaacaacagaaaccacagacacaaagaacgcgacaaagcaggcccgcagaaggaaaaggaacacaaaaacaagaacaacaaacaaggccacacaaaagagaagagggcaacaagcaaagcaggccagaaacagcagagggccagaaaaaaaaaaaagcaagacgaggaagggcgccacacgaggcaccgacggcgcaacgacaagacaaacaggacaccagggcgccaagcacacaggaagaggcaacagagaggcaaagaaaaaaaaaccccccccccccccccnnnnnnnnnnnnnnnnnnnnnnnnnnnnnnnnnnnnnnnnnnnnnnnnnnnnnnnnnnnnnnnnnnnnnnnnnnnnnnnnnnnnnnnnnnnnnnnnnnnncccccccccccccccccccccccccccccacccccccccccccccccccccccccccccccccccccccccccccccccccacccaccccccgaccaagacacaaagagaaagaccaaagaagcggcacggggcaccccggccagagagagagaacgaggacgaggaaaccacccggacaagcaaaacggggcaggaagccaaagaaccgcacagagaacgcgccagggcagcaggaacaggcaggagcaagcacgggaggagagagcccaccccggagacaaaaaagaccccccagaaccagcagaggagggaccagccaccacacagcaagagcccgaagccaccagaaccacgcgggccgacgacacagggcaaaacaacaccaaaaaaaaaaaagcagcaacaaagcagagaagaaagaaaaaaacaacgaagccacaaggaaaaacaaacaggagcaaaaaagagcaaaaaggcagacaaaaaaaaaaaacagcggacgggggcgcacgccgacccagcacgggaggcagagacaggggacgagcgaggcagccggcacaaaggaacaggacagccagggcaacagagaaacccgccgaaaaaaaaaaaaaaaaaaaaaaacaaaagaagggagggagaaaccgaggccgaggagcccacaaagggggaaaggggggaacagccagcagcagaaccaccagacagagagacccaagaaacagaagacccccagcggagccaggaagggcgacacagagagcccgcagagcagcagggaaggcacaacacaaaggaagacgcaacacaaaagaaacgggccagacggccagccaccgagaggcaaaacaggcccaccgcccccaccgaggccaggcgcgcaagccaacaaaacccaaagaaaaaaccgccaaaacaaaccaacaccgaaagaagggaaggcgcaaagaaagacgggaacgaggagagaaggaagaaaaaaaggaaacgggaagcgagacaaaggcaaggcagggaaaaaaaacaggcgcgcaaaagcgccgaagacaggcaccaagcacggccaaagcgccaaaaccaaggagcaccaaagaaaacaacaagccacagagggaagcaaaagaaagagaaagcagaggaaccaacacaaaaagaaaccaaacaaacccagccacacagaaccaacagaaaacgagaccccccaggaaggaaggcggaaagagaaccccagacaaaccaacaaaccaacaagcggagagagaacaggaaggaccaaaaggagagggcacgaaggagaaagaggccaggaagaagaggaccgaggggaagacaaaggagaagagagacagaaggaagaaaggcagcggacagcacaaaaagcacccaaaagcgacagcgagcagcagagagagcgcgcacggccgccgggccagaggaagaggaagaggcacccagcaggccgcgcgacgccggcccgggcacaagcgacgaagccacggaggcgcccgaaggcaagcgaaacggcacacacacccaccaaggaaaccgcagaggagaaacacacagcaaaagacacagaaccccggggaagcgagaggacaaagacacaagagaaaacgcaagacagaagagacagggagaaagcgagcggcaaggaggggagaacagaaccagggaaagccagaccggcccagccggccgggcgaaaccggacagggcaagagacaggccagcccgaaaaacagaaccaacgggagggaggggggacgggcccagccggggcagacagcagccaagccacacgcgccccagccagccccgggcagggaaaaggagggagaagccaaaccaaaggaggggagccggcgggcagcggacaggaagcagggcagaggcgggagaaggaaagaaagggcggcggggaaagccacagacgaaaacaggccgcagcaaagcgagccaaggaccggagccaggaaagacacagaaagaagacacacggggcacacagcagaaggaggggagaagccgacagagggcaggaggcagagcaaaaggcagcacacgacaggccccaggcgggggccacacacaacaaccagggacacacgcagagaagcacaaaggacgcggggacccgacagaagaggaaacgagacagggaggaagaggaaccccaggcccggcagaaaggcgaaggaaggccacaggacagacaggaaggaagcccaaagggagggagggagagacaaacggcaggggcaagagaacagcacaacagaacgacccccgaaccgcgggccacacaaaagagaaggcagagaagaccaaacgcagggagagagacaccgcaaagcagcccgcccaggcgaggggggcgggcaccccaaaggcagagacacagaggaacggccgagccgaacaggaggggcgggaacagaagaaggcaaacaaaaaaacgccacagaaacaaagaggagagaaaaagaagaacaagagagccaaaggaaaaaaaccaacacggggggaaaggaagagaaaaaacagacaccaacaacacacgcccggcccccccacccccaaacacacacccgaaacaaaagcagacaaaaaaaaccccccaaaagaaagaagcagaaaccaaaaacgagaagcacagggaaggagcccacgaggcaccgcacagggcgcccaagaggccagaagaggacaggggcccaggggcggacaagcagggagccaccaagggggcgggaacgaacgaggccgaggcaacccccggccgcagcccaagaagaacaaggcagggcagcgaggacagcccaggacagagacggcccccccagagcggcaccggagaagaggacgggcccaacccaaccgcgaaaaacccaaggcaaaaaaaaccaaccccacaacggggaaaaccacaccgaagaaagacaaaaaccggcccccgggaggccggagcaggaaaacagcaagggaagcgcaagccacaaccagcgcaggcagaccaaacgcaccaggcccgcacagaaagagaaggaaagaaccagcagaggaagaaacggcaagccagagacaaagcaaaagccccacaccgcccgagaagcccgacacggaggcccccggacgaaagaacacccacacagccgcaaaaaaaaaaaaaaaaaaacacaggaagcaggagagaaaaaaaaggaccagagaggaggcacacgcccagcaacagacccagagcaaaaagaaaagaagagaagcaaccaagacaaaacacgaaaaacaaagggggggcacacacaggggaaccagcaaaagaaagggccgagcacaccacaacacacaggaacccgaaggcaagcaagcaagaacaacaggagaggaaaaaccagccaagaccacacagacagccaaaccagagacaggaagcaaaaggacccggggagaaggcagggagccaagcgaagcacgagggaaggggaaggaaaaaacacggggcaggggggagggggagcgggaaagaagagcagaggacgccaccgaaaaaacaccagcaaaaagacaagcaaagaagggaccaccacagcggaagaccagagcacaggaggaaagaggcagaagaagacagacggacacaggcgcaaccgcggacaggaaacaggaaaacacaagcaaacccagacccaggacgacgaccaccaagccgggcccccgaaagcacccgaaacccccacacccaggcaaccaagccccacaacgacaaccaagagaccagcaaagaggaaaaagcggaaccacggcacgcgggacagggaaaacccgccaaccagacgaggagacacgcacgccaggcacaccgaaagagggcacagaccaacagaggggagcacccggggcgggaagaaccaggacccggaagagcagcaggccaacgcgagccaccccagcccccccagcaagcaggcacagaaagagcagcaagaagaaccaaagggagagcaacacgccccgaagacacgcagaacaagcacgagaaaaacagaacaaaggaacaccaggggacagaggaggagagcaagaacaaggagcccccccacaaaaaacagagcaagacaaagcaacaaaagcacaaaccaaagaaaaaaaacacaaaggcccagcaggcaagacaaacacaaaaaggcagaagcagaacaaaggcgacaacagcacaacacccacaagaacaaaagaagagaacacaaacacaaacaacacacaaacagccaaggacaagaaaaaaagaacagacccccgcaacccaccccaaggcaaccaaagaggaagagccaagcccccacaagagccaggacaaagcacgcacagaacgaggaccgagagcagagacaagacaaaaccaaggaagcacaaggcacaggacgccacagcaacaagagcacgcacaaaacaccacccaggaaaaaaggcacccacacagggcaccccacgagagagaaagccaagcacaaagaacccagcccagaacaaagacgaagcacaaagacaaagcacaccccaaacgaccccccgccaaccacggcgcacaaacagggcgcccacgaccaccccaaaagcaacgccgcgaggccaccgcacgacgccccacaacccggaaaagcaggggaggagagagaaaccaaggaacggcagcaaccacaagccaacaagccagcaggacagaacaaggcgacccgggaagaacagggaacgccagagcacaacccaaccaggacaaaaaccaaagggccgagaaaacacccaaagcaaagaagggaaccaggcaccaggaaaacaagcaggaaacagcaggaaagcggggcaagcccaaaaaacagcgcgagagaacaaagaagccgacaaacaaaacaggggacgaacagaaaagcagaagagaaacaccgacgaacaaaaacggaaccggggcgagaggcagaaaaccaaaaggaacgggggaaaaaaacggacaccaaagaacagaaagcaagagggcgaaaaggcggaccaggggccgggccaggaggccagaagagggacagacccgaagcggggacagaaggagagcggagaggggaaccaaaccgacccaggaagaacagccaggcaaccgagcaccccacccgaaacaacgaaaaaaagaagaaacaaaacaaaggagacacaaggaaaaagaaaacccacaacccaaaacaaaggacaggccacaaagccacggggaaaacaagcacggccaaaacgggccggaagaagggggcccagcaagacacgccacaaaaggaagcaaacgaaccaggacgcacggagggggggaggaagcgagagaaacaagccacagaagcaaaaacccaaaacaccgaaaagaagggccacacgcagagcaagaggcccaacaaggagaagaaaaggacacggggagccagaacacgaaaacaagacgggaaaacagaaggaaaaaaagaacaaagagcaagggaaaacagggcacagagcagaaaaaagaaagacccaacccccacacaggacccgccccacccaggacgcgcgaggcagcgcgcgccaggcccaccggccagcggccaaagacaggggcgccgcaggccacaggccaagcaggcgcacgcacaagcaaaaggggagacccgcggagaacgaagcagaaaaaaaaaagaaaccagaagcaaaagcaccccgcggcagggagaacaagagggcgaggcacaccccaccaccccgccgcccaagaccacagccccccccccccccccccccccccccccccccaaaaaaggcaacggacaaccccaggaacccggacacgcaagaacgaaaaggcagagagcgggcacggaaacgccaacgagccgcaccagcccccaccccgagacggacgggagggccacgggaccaaggagagaacccacccaaggccacacacagcaagagagagaaaagcagacagccaggagggagcacaccggccagcagccagacccggagacagaaaagagaaaagccaaaggaaaacaacacagccccacaaaagaagcgagagcagaaacagaagcaaagaaacgagagccaaagaaggaacccgggcaacgcaaagagaagagaaaacaaaagaagcgaaaaaggccgacaccacccaaccaaaagagaacagacagcacaaggaaacgccagcgaccgggaagacccccagggaaggccccaggcaggagacaggaggaaagaacgagcccaagcgcacgaagggagagcacagcacaaacaaaacccaaaaagaacagaagaagacagaaaaacagcaaaacaaaccaaagcgcacccagcacaaaaagcacaccaagcccgggacgagggggaagaaaagacacaggggagcaagcggggacccacggggaaagcccagggggcacagaggggacacgccaggaagcagaaaaacgaggcgacagggcaacacaaagaacagagccccggaacccacaacaccgggcagcgaaggagcaagcacagccaggggcaagaggagggaggacgccaccacaaaacccgccaagggcaaggggaagccccaacaggagaagcaacagaaaagggagaacacacaaaagcggaaaccacaaaggccagagggcggccaagaaccaaaggaggcagagccaggagaagccagacgcaggccacggagggagaggaaggaccaccaggcccgcggccccacccgcccccagccgcgcgacgacacaacaagggcacacaagcggaaacaggcgacaaacacggggcaaagaacgcgcaacgcaaaacagaagcccgaaacagcacgacccagaaacaggaaaacgaaaaaaaaagcgcgaacaaacggcgcagagggagaaaaaggaccagcagaaaccaagccgacgaccaccccaagcaaaggcagccagcaaagcaggggggaaaggggaggccaccagcacgaaggaacggagaaacacacaaacaagcggcaaccagacacaggcacacaaccaagagaggcgaaaaagcagccggcgggcccggaccagacgagacgaccaggcaagaagagaggacaggaacccaaaaacgcccgcaaacaacgaagagagggagggcaaaaaggcggcgacaagggcaaaccgcccaagcaccgaaggcccccccgggggagggagccagaggagccagacagccaagagaaaaccccgcaacaggacaaagaacgggccagacagcgagaccgaagcaggaaggccccagaggacccggccccgagaagagaggggcaaggaaagcccaccaggacaaagaccgacagccacaagaaagccacaacgggagaacaaaaaaaccacggcagaaagagagaaaaaagaaaaagcccaagccggaaaaacaagcacagggaacagacaggaccccgcgaccggaaagcgcgacccccccaaccaccagaaggcaaaagaggcagagagccaagaaccacaggagaagcaacaggcaaggaagaaaagggaaccgaggcccaacaggagggggaaaaaagcaaaagcaccaggaggaaaggaccagggagaagaagaccaaaaaaagacaaaaaagccgccacacacaaaaagggagcgccgaaaccaagagaacgggcagcaagggacggacacggagaaaagcaccgcgggacagagccgaggagagcaagccgcaacagaccacaggcgaaggcaccacaggccacagaagagaaagagcagcaaccccaagacccaaaaccaaaacacacgccaaaacaaggaacaaaaaaacccgacaaaaggggaagcaaaaggaggcgccaggggaaagaaaggagcacaagagaagagcagagcacgcgcgaaagcaagggcgacagggacacagaaaccgcacaagggcgagaaggagcagaagggcccgaaacgccccaggagccgagccggcaccgcacagcacccccacaaaggggaaacggagacgagacagagaaacagcaacaccaaaccacggcaccaacagagaaaaaaagcgcacgggaggggagcggccccccccccccgcgaccaggcgaccccggagaaaaagacgaaaacaaaaaacccaagcacaggaagacaagccgagaacgggcagaaaccaggccagaaggcaggcaccaagaccgcacacacaacgaaaacgaaaagcccaaagaaaggagaaaaaacgggagcgcaaagaaaaagaggaacaaggccagacaaaagcggcacacaggcccccgacccccaagacgcaaggaggacgcaacgccgcgggaaggagagacgcagcagggcacccgacaaacacagaccaagaagcaaggaggaggaaaggg

SEQ ID NO: 719 - RNA, 2448 nt, Mus musculus
aaccagcggagggacccaccgcacagccaagccggccaccagaggcagggccacagaagaaagaaggcggcacacaggagaggcaagcgcgcccccagagcccagccccgacaaaaagagggagccacaaggaagagggcggaacgacggaagcaaccagagacccacagcgcccgagcagcacgcgcagggcacagagcacggcacgggaacccagccaggggcaacggcgccaaaacccagaacaaagaaaaagagcacggcccccccaaggccagccgagccgacaccgggaagagcggcccaccgaggagaaggcgaggggaggccagagccggaggagacccccacacccacacccagcaggcggggccacgcagcgagacccaaaccccaggccggccacgaccacgcacacggccaggccaaagccggccgccacccagccccaagaaacgacaaccgcaccagcagagccacaggaaaccagaagaaaacagagcagaggaaagcaaggaaaggaaagcgcgagagagcaggggcgacaagacggaaaacaaacccagccaaaggaaaaaccccagaccaacaaagccgcggccgccggagagaacagggcccgagggggacagccccgaggcagcccacccacacaggggaaccaggcaaaaaacaagccgggcggaacagagaccagccggaggagggagcggcggcgaagccagcgccgccagggccggacggcccagcgggaagcagccacggagcaccgcccgggcacccgccccgccacccagccgcggacccgccagccaaaagcaagagccagaaacccgagagcacccagggcgccagccgacgagccgggcaagaacccaagcgcccagacaaggggcaaggaaaaccccagaccagccaggaagcaggaagcaccccagccaaccaggagggaaaccacggagggcagacccggcaggacccgcccacagacacgggaacgggaacacagggaccaaaaagaagaccacaggagaaaggggaagccagcacccagagcccaaaagacgggagcagccccgggggggcaaggcaaccagcacgggggaaagagaaggcaggagacggggggggccaaagcaggaaccagaggacaaggcgaggaaaggcccgcgaggggaagagaacacagccacaggagaggaagaaggaggggccggggcaggccagacccgaaaccgagggaaacccgggcgagcgcaaaaaagaacaccccgcacccaaagccaaaacagaaccccgccagccccccccaggggcggggcaaggaaggccacagccgcacagcccaccccaaaaaacaagaaacggaagagacagcgcccaaaagacacacgcgggagagagcccgcagaaagacgcagcagccgggccaggagcacggcccccggaacggagcccgggggggagccaccagggagcgggaccgaaccgggcccacaagaagagcaaagccgagccaccgagccccccagccccacccagaaagcaagaaccgagcccaagaagccgccccgagcgggcgagcgaacaaccaaggacggccagcagcacgcgaagagagacgaacaggaaccccaagaaagacacaacaagcaaaaagggagcgagcacgaacccccccagaacccgaggcggggagcaaggacgcaacagagcgcaagagagaagcagcgacacgggaagagcggacaccaagcgcccccgcgccggggccgccgggcaaagacagaagagaagggggcacagggagacagggggccgacacagcggaagggcggagcaggggaggacagggacccacacccacccaagacggaggggccgggcgcaaggaagaagagcagggaacagggccagacacaaggcaggaacagccaagaaccccaagaaaaagaagcgagggcaaagggcccagccggcaggcaagccacaacacacccgagccagagagagaggagagggaaagcagagagaggcaggaaccagggccaggggaagagagcaaagagcccaggacccccaaccgcaggagcacaaggagaggacaagaaggcgcaaacagacagaagcgaacgggccgaaccagaaaggaaagccgccaggaggcagcgagaggagaaaacaaggggggaggaaaacccgaagaagggcaacaagaagccgcaagaaaagacgagacccaccgggaccgcgcggcacagacaaccaccacccgcgcgagaggaacaaaaaaaaaagaaaaaaaaaaaaaaccgaaagggccagggcagaagcaagcgaccgacaagggagcaggaggccccgacgcgggacaaagaagccagcggggggacaacgaaggaccagacaggcccacccagggacaaggcccacccaggggaagccccc

SEQ ID NO: 720 - RNA, 3607 nt, Mus musculus
agcccagggagcgaaagccccagaccagccgccacaaccagaaaagaaacagcgccaaagcaaagcacaaggcggaagggaagaagaaaagggagagaagaagagccaggggacagagagaaacgaaaaaagagaaacgaaacggccagacaaaaccagcaccaaaaaaaaccgccaccgccagacagacagcaccaaggggacaggacccccaagcccagcaaaagaggagaaacagaacagaaaccaaaaaagggacagcaaacggaacgaagggagaagcaagagggccaccaaaaacaccagcagggcgcgcagagggaaccgcagcgcagaacgaaccgacgagaaccgcagccaaaccacaccagaagcaaggcaggcgcgcacaccaacagagacagccgaacaacagcaagagcccacagccgcggccgaaggccaagggcagggccagccagagcacgaacagccacccgcagaagacacgaggcagcgacaggggaagcgaccccgcagggaaagccacaacagcagacggaaggacccagaaagagaaagcagaaaaagggccgggcaaacggaagacgacaaagcagacaaaagagaaagggaccccccggcgccccgcccgagcggaagaaggggagcacagagcacacccaagccgacagcaggagcaggacacaggaaacaggagaggggcccaggccacgccagagccggagaggaggccccggaaaggggacaaaggccagccccgacgagacaagcggcccaaagaaggcagcagggccggcacccggcccaaaaccgggcagccggaccgacccccagcacgggacgcagagccacgcacaaccaccaagccgaccccccagcggcaaaaagagcagcagaggaaagggaaaacaaggccaggacacaggggagggggaccaaagaggaagcaagaggaagcagacggaccacaaagggggagcagagaaccgaccaagaggcagcagagacgaggccccagggcagcacaacacaggacgggccaggaaagccccaaggaggaaaaaaagaacagggaccccgggccggcccgggcccaacccggccaagaccaagcaacacacagaggacacacagagaaaaaagaccgcggggccggcacaaagaggagaagcgaggcagggaagaaggcaggcaggacccagaaaaccaagaaccggcccgcaaagaacagagagggaggcccgcaaggggccagacccccccagccagcagggcacgaccagagcagaaccccagcacgcccagaacaggcacgggccgcccgggggcagagggaaagggaaaaaagggaccacccaccagcaggcagccgggggcaagggagcagaaagaagaaaacaggagcgaccggggagaaaaccagccaagagagagagagagagggagagagagagagggagagagagagagagagggagagagagagggagagagagagagagggagagagagagagagagagagagagagagagagagagagagagagagagagagagagagagagaaaagcagccaaaagaaaagaaacaaaagcaccagcggagcccaggcccaggccccacccacacaagcaagacggacccggagccgcaacgcccggacacaaaacccggcgagaaagcggggaccgcagaggcaaacagcagcccgaaacgagggaagccagacagaaagggcaaagacaagcagagaaaaggagaggcgcccggcagaccagaccccgagggagccacacggcgcaagaccgcccagaagggaggcccgggcaacccaaaggccgaggcgacgcccaacgcccccccccagccaagcacagaggccacaggcagcccaggcagccgggcggccacaacagcagcggagaaaagggaacgggccccccaccgccggggccgggagcacacccgggcaagagcccggcagggacacagacccagaaccgccggccgcccaaggccccgcacacacacacacacacacacacacacacacacacaccaccaacaaccagaaggaaaaggggcaacaacaggcagaagaccaagccaagcaaaccacgcacccaaccgggaggcgaggacgacaaaaaaaaaaaaagaagacagcggcccagaacaagaagccgcaaagcaagaagagcagccagaaccacacagacaagcaacgggccaaaggggaagaaagacccagaagcaaagcagaacgcccacgcccagccccgaggagaacagccggagaaccaagaggaggcacaccccgccacccaagcacccaaagcaccgggaaaacaccagcaaagagcacccgacaagccggaaaagggaaggccgagagcccgcacgacacacccggagaaagcgagcgcagcaacacagacaaggaaacggcgaacaggggagccgagggcacgagccaggaagcggaaaaaacccccagagccacacgacacgggaccaagacgagacagagggaaacacagagacaggaggacgaccaaaggagacaaggcgccggaaaggggaagggaggaggggcaggagaagggagaacccagaagcaggagagacaggagacaggacaggacgagacgagaaggaaaacaagcgcccaggagaagaaagaagagcaaaaagagagaggcaggcaggacacagaacacaaaggagaacaaagcaaacccaaggaccagacgagagggggagagagaccagcccacccgaggagacaggccagggagaggcaaggcgggcacaaggccgcagcagcaggccccgaagaagaccgaggagagcagaagagccaaggacccgccggagaaaaaccaaacaggaaaaggaggccgaacacgagcgcacgacagaaaaaaagaaaacaagcaggaaccagccccggaaacaacaacacaaaaccaacacagcgccagaaggaaaaaagaccgagaacaaaagagcaggaaacccaagaccagaggagcgggacagccaagaaaggacagaagacaaacaccaaagacacacacagggaccaggaacgaaccagccagaccccaagcacggggggcagcccccagccgaaggccggccaggcccggcgagagccaccccccagagagaagccagaaacggccaggcccccaacagagggcgcagagaagacaggcaaacaaagacgccggagaggaaggccagccggacaagcggaaggcgccacgccaggaggaagaagggggcaggcgacagacgcgcgacccagacacagcggaacaccgcaccaggaaagaagcagcgagcacagcgcagcccgaagccgggccaacagacgagaacaaacagcaaaggaaagcagggcccccaccccccccaccccaccccaccccgcccccccggcccccggcccaggagagaggagccagcgaaaacccaaggaacgcacaggggccggccaccacgacagaagcgaagaaagcgacagaaagagagacagaagccgagcaaaaacccgggaccccaaaaggaagaagagcagaaacagcaagaagcaag

SEQ ID NO: 721 - RNA, 3957 nt, Mus musculus
gggaaggccaccaagccccgaaaggacaacgacaagacagagcagcacacaccaagcaaaaagacgacgaaggagggggggggggggggggaccccccccccccccccgcccccccccccccccggaagaagcacccggggccggaccagacaaccaaggcagccgccccacccgcgaggcgggacaaggccaaacaagcacccaggagacgcagcaaccagcccaagagcacagagaccacagcacagacccaggggcgcagcggagcccgggaccagacgcaggagccagaggacacagagaaggaacgccacgagggaccagaggaccccccccaggccagggccaccacacaagacccacaggggagaggcgaagggggagcccaccagagacccaccggcccgcagacacccagcccagacgggcgaccgagccaaggcccaacaaaacacaaagagaaggccaaaaaaagagaagggccaaggcagccaggcagcaaacagagcccccgccagcccccaaggcgggaacaaagaaaacaccgggcaaaaaagaggagaacaggcagaagcccacaggccagacaggaagggacacacccgccgacaagggagcaggaccccacaaagccagagaggaaaaagaacacggaggaccacacgcagaccccacccgaggcgcaaaaagccacagacagaaaacgagacaaaaacagggaggcggacaaagccaagcagacggaacggaaaggcaccccccccgccccccggcccccccccccccccccccccccccgccccgagaagggcacgaccgagcagcggaaccaacaggagccagacggccaaacaagaaccccgccagcccccgaggcggcgcaggcaggcaccagcagcgagaaaggaccagggaggggacaggaaaccagcccgagagaccaggaggagcaagcaaaacaagcagggcccggaggcaccagcccaaggcgaggcaagcgcgacggaaaaagagaggcagacacgagcaagcaaggggaggacaagcgagagcacccaaaccaccagggacgccccaggcaggaagggcagccccaacacagacagaaagaggcacaagcgaggggaccaggccccgcaggaggcaccgggaccacaagcccggcacccccccccccaggagccccagagcaggaaaagccccaggcagcagacagccgggagggggccggaggcaaaagccccagcgcgccacccgacccaacccgcgggggcgcagcgagaacccagagcccaggaaaccaaggaagggcccgacggccacgccgaagagcacaagccgcggccacaggggggggaggcaggccagcggcaaaacaacagcccacaccaacaagcagcacccaaagcgaagaaacccaaacgcggcagggggcacaggcgaggccagcacccagagacccaggagcgaggcggagagaagcacagaaagaaaaccagccacacagcacagggagggcaggcacgaaggccgccaggagggaggacacaggaggggaccggaaggggaaccaccggggcccagggggcccaggagagccgagcgagccgaagcaggggagggacgcccaagccagaaggccagcggggagagaagccggagacaggacaagggagaggcagaccaagaaaagcgccccggccaccccgccgcagcaggggaaccgcgcccccccaggccccccccccccccccccccaaacgacaacaggaagagacgaggcaccaaaggcccacaaaccgaggacgaccagcacccagccgcccccccaccccacacccacccccccccacccgcccccacgcagggacagaaacgaaaaacaaaaaacaaaaaaaaaagggaacgagcggggggaggaagcagagagcaccaggcaaaaagggagccacgcgccaaagcgaccccacaaccccgacaaggaaaacccccccacagaccgagcacggcaagggagcagagggaaggaggcacaggggcacaggggcccaagcccacccaggcccgccgaggacaagagcgccccccaagggaccgaggggccagcgggccaggaggagcggcaggaagagcggagacaccacccaagccggagaccaccgggcccggcgcccgaagaacggcgggggaagaggggggcgggggggcagagaggcagcagcgggcgccccgcccgaccaggccaggaagggcgcagagaaaacgcgccagcaggagaggagacgacggacagcccacggcccaagggagcggacacggcaccgagaggagcaggccccggggccgaggcaacgaagacacacggagacccccgcccgcgaagggaaaggcccagacgcggggcccccccagagacacccgagggggccagggaaagacccagaccaggggcagccgcaacaagcccacaaaggccagggagggaccagaccacagcaggagagggaaggaccacggaccaggcgacacagcacagggccaaacaggccaggaagagaaaagaacagacccacacacagcacaaagagcacaaagagaacagacccagagacagcaccaagagcagaaaacaccacggccgcagaggccggaaaccagcccggcccccacacaccacgggccaacaccagggagcagagaggacacaagcaaagaaccacaacagaaccagcggccccaacacagcagggggaagggacaggcgaaaccagcgacagagcgcggggcggaccaaagcagccaccgcgagcacagggggcagagggaaagagcacacaaccagaggacacaaaaaaggacaggagggcgggagaggccaggggaagagcacccgacgccccgaaggccagagcaaacccagcaaccacaggggccacaaccaccgaagagacgaccccccggaggcgaagacagcacaggacacaaaacaaaaaaaacaaaaaaaaaaaaaaaaaaaaaaaaaggacaggagaaaaaacgacaaggagcggggacaaccagaacgaccgcaacaggcgggggcgggaaaggggggcaagaagcgaggagacaacggcacagccagcaacacaggaaccaccaacagaaggggcggggcacaggagcgagcacgaacaaggaaagcaggccggccagcgggcccagaccggaccgcccacaagcagagggggccgggggggcccccacaccccaccccgagcccacggcagacggcagcagggagaggcccgaagagggcgcccggaaccccacaagggcgggagaacccggccccggaagagcagccagcacccaacacagagccacccagcccgcgcccgggaagacgcaagcaccgcaccagcgggggggggcgagacagggccggagcccggcgccggaaccaccgagaccaggcggcccgaaccagaaaccgccgcccgcccccaaggcgggaaaaggcaccagccggccagcggagaagcaggagggacaacggccccagcagcggccagaagagggggcaggccgcacagccgccgaagccgagacgcccccagaccacccgcccgcccaggagacaacaacaaccaaagccccccgaaggaaccgggagcggcaggccagggcaggcaccaggcaaagccccacagcccaacggccgccggcacccgaagcacccaggaaagacggagcccaaggcaacaccccaccccggaaacggagacaccagggaacaaaaacagcgcgcgccaaagcggcgccacgcaccccccgccgcacccccccccccgaccacagccagcaggggggccgcggccacccccccccagccccaggggcggagcacagcggaacagccaccagcacgagaccacaggggagggcgcgagcagccccccagcaccccccgcagc

SEQ ID NO: 722 - RNA, 9015 nt, Mus musculus
caacaacacacaacacagacacgaaaaacacgaccaccgaccggcagagcccacaagacggagccccccccggacagaagaaaccaccgacacaaaagaacccccccagacggaacaccaccgaagcacagaccagccccggagggagaagccagcaggacacgggaaagaacggggcggcacagacaagcaggagacagaggaagagagggaggacagaccaagacccgagagcgggcgggcagaggcagagccaagaaacggagaagggaagggaagcacgggggagccgcgcggcagcagaagcagggcaggcaggaagaagcgacccgcccacccacccaggaggggaaaccgagaccagagagagaaggccccagagaacagcggcaaggagacagaccagggcaagcagccacacggccccaccgacagggaaggggacgagcagagggaccagacccaggaaaaacaggaaggacaacagagagcaccgagaccggcaccacagagaccaaaacaccgaggcaacaccgccccccaggacaggacaccacaccggaaaaagaagggacgaaacccgccccagacgaagcccagcacagcaagaacacaacagaacaacacaccgaaggagggagcaggccgggagcgacccgaaaagccgcgccggagagcacacgggggagagaccgccagcacagcgggcccggcccgggcaagcaacccgggccagcccaagaaagaccggagggacggaaggaagaaagacacaaagaggacagcaccaccccggaccaggcaggacgaacagggagaaaaggaagcgagaagcgcgccggggaagagaagggacagccacccgcccacaacaccccacccaggaacgcagcggagcagagcccaaaaagccggcacccaagggccgagcggaagccggagcaagaacaagaagccccacccgcagcacagagccggccaaaaaacggaagccaaagcacgccgcaacgaaccgggaccaaccacgaaggaagaaagaccagaaggcagagaggcacggacaaaacacagaggccaccagcacagacagaccagagcgaccccagaggcaggcccagggggcggagacacggaggcagccggggcacccgagggcagcgggaggaaaggagcgcaagaggcaaaaagacaggcaggcaacacgccacgcaaagagccaagacaaggcccccgggacggaaggagagcccacgacgaggaaggagaaacgcggagagcccagggaaagggaggcccaggagacaggcaagaaccacacaccgcccccgaaaagacaaggccacgagacaccgcagccagaagagggcacagaccaaggagggggagccaccagggcgggaagaaccaggacccaggaagagcagccaggccaacagagcaccccagccccgcgccaccaggcaaacagaacacaagagggagaaggagaaggaaaacagacgcaggcgcagccaagaccaaaagcgaggaaaagaaacacagagaggaaacagccgaaaaaaaaacccacacccaagaaacaagccaaacaccccaacagcaggaagcccaaccaaacagcagggcgagaacacagggaccagccaaagaacaaaggagagcaaacaacagcaggccaggaggccagaagagggcacagaccccccgaaacggagagagacaagcccccccaggggcggggaacgaagcccaggcccgcaagagcagcaaggccaacgcgagccacccagacacagagacccaacaccccccccagccacccccaacccgccagcagggagagccagagcccaagacaacccgcagggcaacccaaggaagggaaggaagcgggcgccggaacgagaaggaaaagaaacgagcaacacgcgaaccgggaaagccagcagcggggagacccaagcccacagccccccagggacaccccaacacgacaccacaggacgggaccaacaaagcccagaaccccaaaggccagagcggggaccagacccaacacaggcccgggagagcccaggccagcaggacccagcggcggggagggaacccccccgcgcggggggccaacgcccacaccaggggggggagaggagcccaaccccaggcagccagaaagacccggagaacagaacgacaacccgcccccccgcagggccccccacaacaaccaggcccaccccccagaacggcccgcgccaggcagcgaaaagacgcgcaaccagagcgaacggggacgaaaagagccgcccacaagacagggaccccaaagaaacacaccaagaagaacaggacgcgagcagagccaagaaggcacagaccagacaggggggccgggacgcccaaggggcaagggcgcgcgaaagccgaggacagagcggcgagccccggaacacccccagagcaggcagagcacccgcagggacagaaggcaagaagaacgcggaagggggggagaaaacagggacaccgggaccaggggagaaccggcaggcaggagccccaggacgaccagggaaccccagacgaccgacagacacccaaaggaggcgaaggggacaagcagcccagggcgacggggaaccggccagcgggagccagcggaaggagaagggaagcagagggaagaaccgaggcagccagaagaaaaggcgggagaaggagagccagccgacacagcccagacccccaaccccagacacaggcagaacagggaaggaccaagcaacagcggagaacggagcagcagggcggggaacgaggaagaccaaggggccccacagcaaggggaaaagcgagcagaagccagcagaagaaccaagcaggagaacggcggagcaaggaagccacacgaaaaaagagggggaaaacgggccccagaccggaaaaccgggggcaccagggacacaaaggaaacccaacagccaaaggccaagggagaaccccaggcagacaggaaacccccagggaccagcagcagggccaccgcggggccacagagaacaaacaaacacacagcaacccacacccaagaggaaccgcccccaggggaaaaaagaaagaggggacccaggagcccggggcgggggccagggagcggaggaggcaggagagagcggacgagcaaagaaggaagccagaggaaagagggagaagcagagcgggggcagagcgagggagcaaggccaggggggagcagggcagagaggaccgggaagacagcggcaagggggaaaaggcagggcgcgaagggagaacggagagaaaagacgaagacgagcaagagagcgcggccaaggagggacacaccaacagacaacaagaaaaaaaaaaaaaagaaaaccaccacccccaagaggccaagggcagagagaaacacagaggcagggccggaagagccggggcagccccccgcacggggcggcagcggcccagcaggccgcaaggggcccggacccaggcacccagcaggagcgaacgccacgccagcagacgaaaacgagaggagagaccagccgggccgacccagggccaagaggagagggcgcgaccaggggggggcccaagaggacaaacagagcgaccacaaagaggcgcaggaaggggacaggcgcagcccccaacgacacagcgaaccaaaaagacgagagacaagaaggagaaacagaggagacacacacaggacgccaccaggagcgagcccaggcgcccagggaaaacccccaaaaggcaccgccagaaggggcacaagaaagaaaaacagcacgggcagaagggggcgcgagagaagccccaaaaccaggaaaaaaacacaaaaaaaaacggggaaacagggccggggcaggcaaccaagcaagcgcccagaccacagacacacacacacaccaccacaagaacaaccgggaaccgccgagaaaagaggacaacaagccgcgccacaggcacgccccgccagcagcacagcacagagacccgcgaagccagcagccacagacacccagaccaacagcaggcaaaaagacaagggagaaccagacgggcaccgaaggcccagaaaagagcaagccaacgcccaacagcccggccaccaaagagaagggaaccaacgggacacagcaccccggggcccgaccagacccacggaacaacccagccagaggcggggagaaccggagcagcccaagccgcgcaaaccccccagcccccgggggacgggccagggcccacacaggccagagccaggcggagaagccgaaggacacacccgggaccgcccccggcaacccgggaagaaaacccaaaacagcaccgacccggcgggagaacaaaaagaacccaagggaaaccagggggccagaaggaagggagaacggacaaggaagaagggaaaagccggcaagagagcgcggaggacccccagggacaggccggccccagggggaaaagcacaagcgacgggagccagaaagcacaacagagagaccgaaggccaagggcggaaaagaacaacagccagagcggcgaaacaagccagggaaagagcgacggaggcgaaagcgagaccgacggaggcggggacagcaccaagaaaaggacaaaaagggaaacagggaaaggccaagcggcggagacgaaagcgcgacaccgaggacaggaacaaggaagagccgcaccaagaagagagagacgaaggcagaaacaagcaaacccagccggaagcagggggcaagaacagagacgggcgccagagagccgaggcggggccccagggaggacaggcgagaccaggcacacaccaggcaggcacgcacggccccccggccagagcagagcaagccagcccccccagggaggagagggaccaggccggcccaaagccccccgcgacgcacccccaccgcacgcggccaagaagagcgggggagaaccaggccaagggaaagcagcaccacgaaggggagggcccaagacggccaaggcagacaggagaagaaaaaaacaccaagagggggaaggcaggagccagcagcagccagccaaggggacacacaacacagggaggaagggcggggagagagacggacaccccaaggggcgcacccccaagaagaaagcaaaacaacgcacagagcaggaaggggagagagcgacccaggagggaccggacccccagcggaagaggggagggacaaggcagagaggccaggccgggggggggaacgcacagaaggccacgaaacgggagacaggcggcgaggaagggcggaggggagggggcaggggccgaaccagccggcccccagggagagaggggagggggaaggggacgagcggagagggaggcgggagacccaagagccacaaaaaaaggcagggaggagggagagccagcacgacgagacgacccaagaagagagagccagaacggaggccccaggagaaggacaggaaagaaaggggggggagagcgaaggaggacacaggaagccaaaggacagaccaaggccgagacagggccaaagcccggcgccggaaccacgagaccaggcggcccgaaccagaaacgccgcccgccaccgaggcgggaaaaggcggcaccaccacgcccggaccaagggcacgcggggccaggagaaccagagcaggggggacaaagccacccacgagcacgggccccgagacagaagaaagggggggggagggaggaggaggaggagaagaaagcaagaaagacaaagcgagaacagaaagcacaagacaagcggcaaaaggcagaggggcacccgggggcccgaacaaaacccaaaacaaaccaagcaccaaaaacacagcaccgacaacgagcaaaaagaacgaaggacacaggccggccaaggcagaccagcccaacaaccggcagcacaacaaccaccgaccagacgggggaagagaggggaaggcagaccggggagccagggccaccaccgaagccagagaaagccccccgcgcgcgccggacggccagcagaacgagcgcaacaggacccgcacacgagggagagcgagcagaggcgaagagaccccgagcccagaacgggcgcaaaggccaggagaggcggccacacccggaggagcacacgcccagcagcccacgaggcacccccgacccacagagcccaacaacccagcagccacacgaggaacccaaagcccaacagcccgggccaggcaggcgcaaaaaacacgcaagacacaggggcaaacagcaggggccagcagagcaggccaccgcaacggcacagggcccacacccccgaagcaagacggagggggaggggagagagggcccaaggggaggcagagaaggcgagagcagcaggaaggagccaggggcacgggggggggggggggggggggggggaggggggggggggcagcagggcggagagcaagcgcagaaggaggccggcaggcaccagccccccagcggcacggaagggcgggacaccgccggggggagcaggcaaccaggcaagccaccggcaccagagagggaaacagacagggagcagggaaggaccggggcggggggcgaacggccaaggccccggacacccaaggccccagccacccaagggggcggcccagcacacgcagcagaggagaagaccaaggccccaggaagaaggaagcccacccgggaacagccagaagaccagaccaggaaccgcgggggcggagaggcccaaagacggcaccgggaaacgaggcagaccggcaggagggagagaggaaccgagacagagagaacagagaaagagaagagaggagagagagagaggcgcgagagagaagagacagacacagacacagagagagacagagagagcgcgagcccggcacaacccccccacagaaccccccagccacgggacaggccaaaagagacggaggcagaagccgccgaagaccaccaggcaccaaacaggaccagagggaaaagccagccgccgacacggcaccccccgcccaggacgccacgggcccgacccggcccgcccgggaccggaacccacgagagcagcaccaaaaacagccagcgccaacggcgacgggggcccaccaagccccaccgagcgaggcgaccgaacaggaccaccccgaagcgggagacagggggaaccaacacacccaccaaccccacaacgccgagacaaccccgccccccggggagagaaacccagaagaacaggacaggccagggggacccaggccaggacagacaaacaaagcccgcaaaaggaagcacacgcgccggcacggcacacacaggcacccgagcccgaagccccacgggccacagcaggcccagaaccggcagagaaaggaacgggagcgggaggacacaggcccgcccaaccacgcaggccagggagaagcccgggaaagacaaaaagaacaggaacacaaggcagggcaggggggccacccccgaggcgcgaacggcaccacgacccagcaccacaccgcaggaaaagccgggggacaggacaacacagcccccagaacagaccaaagagacaaagaggagggagccacccagaggcacgcagcggggcgccgccgccaccccccccccaggcagggaggagaaggggggggggccgaccagaggccaaggagagccagagcaggcaggcccggcaaaggcaggccccccaggcggagccggggccgccagcacaaacgcacagacaccaagaacacagccgcgcgggcagaaagaaagcggggggggggggcaaagagggagaccggcccgagagagggcggagggagccacaccagcaaccgacagcagggggccccgcccacacccacaagggccccggcgcacagcagccccaacgcaagcccccccccccccccccccccccccccccccccccccccccccccgcggagaacggggggacagggaggaacccaggccgcccgcaagacggccgggggagcccgggggcacggcgagcgggaaggacgggccccacgggggggcacccaggcagcccaccaccggcccccaagccccaaacacaaaaaaaccaccccaacacgcgcggcaaaacaagcacagagcacacacagaagaccggacggaaggcacacccccacagagaaggcagacaaacaaagccccagaccccggagaagaacggagggaaaaggcagcccgggcagaccccggcaagaccagaagcccagacagagggagaaagccaccagaagaaaacaaaaaaggacacagacacggaggcccccccgcccagacgacccacccaaccccaccccccccaaccgggggggggggggaggcggggcagcacggcggggcccgacggggccaaggcacacaacggaaacaccagaggccaccgcaggagggggacccagcagggcaaaccaccaccccaccaggcaggcgggcccgggaggcagggagagcagggggcacgggggccagcggggaagcccaggcccccacaggggcagcacgcccacccccagccggcgggggggcagcgccaaggccgccgaggaaagcgcagcgcccaccagggccgacacacgagccagcaacaagcagcccaaagccagcaacaagaggggccaaggagcagcaacaggaggaggaagcaagagcacagggaccacgcacagaggcagggggcgcaccgcccagacaccggcagaggccaggggaccagggacaccagacaacagaggacccaggacgggaagggacacacgggacagaccagaagggggccccagaacggcgcccccccacaggggagcgcgaggccgaggggggggaacaagcaggaccggccaacccagaacggcgcagacccagccaaacaccaaaaccaacgcagagaaacaaaacagaccagcggcagacaaaagaaaacaaca

SEQ ID NO: 723 - RNA, 3754 nt, Mus musculus
agcagaggcaggcagacgagcgaggccagccggcacaaaggagccggacagccagggcaacaaagaaacccgccgaaaaaaacaaaaaacaaaaaccaaaaaccaaaaaaaaaaagagagagagagagaggacaggccgacgcgaaccagcccagccccaagaaaacgaaccccaaaccaaggggaagaaagggaaaaaaaaccaccaacaacgcagaaaaaagaaaaaaaaaaaaacccagccaaaagagcaagacacaaagcaagaacagccaaaccaaggccagaggcaagcgcaacccaacacagcaggcagagggagcagacggaggaggccagccggccacagaggcgcaccaagccagccaccaacacaaggagaccacaacaacaaacaacagcacaagaaaagcaacaaaaaaaaaaaaacgaacaaacaggcaggacaaaaaacaaagcaaacaaacaaaaaagagcaaacagaaaaagaaaagcacaaaccaaacccagaggcaaacccaggacgccccggcggaggaacaaggggaaggaccaccaagacgcaaacgaaagcaaaacccccagaagacgaaaaggggcaacccagcaagaggagcagaccgaaggcggcacagcaagcaaacaccacagaccacgccaacaaaaaggcccaaagccgggcacgagaaggcgccaccccagcgaagcgcgaggacggcccgcacccagggccacacccagaacagggacgcaggagccaaaacaccaaaaaaccggccagcacccccccccaccgccgcgccccccaccgcaccagaaagccgcaggaaggccccggcaggagaccagccaggcggccaggcagagaccaacccaccaaccacaagaccaaagccagagaaaagggcaagaaggcaaaacaagaaagaggcaaaagcaacacgacaaaaaaaggacccgcaaaagagccaacgaccaaacacaaagccaagagcaagcgagaccaaaaggcaaacgcaaacaaaaacaacacagcaagaaacagcccacgaggcaccgaaaccaagcggacagaaaaggggggagagagaggggagacagaacgaaaacccggccacgcgggcgcaacagcaagagaacagcacagcagacaaggcgggaagaacccaccgcgagagcggaaccaaccagccaccacagacagaaacacaaaccccgaagcagaacaacacgggacacagcgggcacaaagccaaaggaaacgaccaggacagccagaacacacagagaaacccgccaaaaaagaaaaacaaaaacaaaaaaaaacaacaaggagacgaaagagccaacaccacccggaaagcaacccggacgccgagagggagcaaaggccagacaggagacaggcaggggagcaggcccacccaccacaccaagcagcagaaagcaggaaaccaaaggaaaggcaaagagggaagggagcgaaccaccagggcaaaacacaccccaaccaaggaagaacggggaacgaccgcagaggcacaggccacaagacgggcccagaagcaggaagagcccacccggcggccaaagcccagaacaacacaaaacaaccccaagcgccccaaagaaacagaagccgcccgaggaagcaacgaggaagacagagacaccggaaagcagaaaaaacaggggcaaccagagcccagacacaaacaagaaggagcgcagcagccaagagggggacacgaagagccccacaaagcaagaaaaccaagaaacaaacccaaccaacaaaacagcggcccagcggagagggcaggcgaagaagaacccagcgacgggcccagaggaggaaaagaagaaaaacaaagagaaaaaaagcacaacaaagagcaagggaaaaccacagcagaaggcaggcgcgcacagacaagggagggaaaccaaaggggggaccaccccaggaaaagacacacgagcgaaccgaaaaccggccagaagcaacccaaccagaaaaccaagagaggcgagaagagaaaaacccaagacgcagaacagcccccgggcgacgccagaaggaggcagggcagaaagccacgcaacaccggaccccgaggcaaagaggcagaaagcagaagccccccgcacaaacgacagaggaggcccagagccaaacagaaggacgaagaggcggaccggcgccaaacgaaacgagcagcccagcacaacaagcccacaccgcccaacagaagagacacaggaggggcaaaggacagaaaagccggaagacagcaagacaaaagacacaagcaaaaaagcaaggacacgccccacagaaacggacgaggaaagcacaaggaaacaaaacaccagcgagacaagaaaaacaaagccagagacaacaaaggaaggcagaaaaaaaaaagcacacaaaaaaaacaggggagcacaaagacaggacaaccgagagaaacggggaaagggagcgagagccccaaaaggcgaggaacaaacaaaaacaaaacaaacagcgcacaaaaaccccaaagcccaaaaaccaccccaaccccacgaaaaaggaggaagaagaggaggaggaagaggccagcgcggagaagcggcagcagagaggaagaggggcccagcaccccaggccaaaacaagaccgggaccaacacacccagcccaaggcaccaacacagcaggaaaaacaccaaacgaagaaaaaaaagggcagaaaggggcagaggcaagagcacgcgccgagaggacccaggagcccaccgagcccacaggccacaaccacccagacacagcccaggggacgacacccccgaagcgaggacacaaggcacaacagcagcaacaacagcaggaaaacaccaacacaaaaaaaaaaaaagcacaagcgcacagaagggaaaacgaacagcaagaccaagaagacagacacccaaggcagaaagaggaaagcaaaaagcacaccacaaaccaaaagacaaaaacaaaaagcggacagaggaagggccccgccaacccagcaccagaagaagaggcaggcagaaccgagcaggccaggaggcagagaaagccagaaagccagggaagcagagaaaccgcgaaaagaaaagaaaagggcagaacagggaaaaacagcaccaccccaagaccaagaaaaaaaagccaaggagggggggcaccaaacccaacagaaaagaacaaggaaaaggccagaccaaacaagggggaaagagcccgccaaaaaggggcagagagaaaaggggacagggaaaagagcggaagaagccaagaaaaggaacacgagcaagacaggaacagcaagccaggacccaagaaaggaaggggaccaacccacagagcgcccaaccccaacacgcacaacaaacagaaagaagaaaaaaaagaagaggcggaaagacagccaaggacaggcgcacccagaggacggagaccgccccagcacacacgggggggacaaaaacgaacccaggacaagagcccccacccaagggaaaacacaaaacacacacacacacacacacacacacacacacacacacacacacacacacacgaaagaaagcacccagcagaagagcagggaaagaacccgggcccgaaacagacagggcaaaccaccagccagaagcgcagaaagcgccccagaagggcaaccaagagaagggcaaagaagaaaaaaaacaaaacaaacaaacaaaaccggagcccc

SEQ ID NO: 724 - RNA, 87569 nt, Mus musculus
  misc_feature (9739)..(10432): n is a, c, g, or u
  misc_feature (11885)..(12310): n is a, c, g, or u
  misc_feature (13310)..(13941): n is a, c, g, or u
  misc_feature (34406)..(34505): n is a, c, g, or u
  misc_feature (65490)..(74150): n is a, c, g, or u
  misc_feature (78133)..(78232): n is a, c, g, or u
  misc_feature (84472)..(84571): n is a, c, g, or u
  misc_feature (85233)..(85559): n is a, c, g, or u
agccagaagacaagggggcacaaaggacagggcggagaaggacccaagcccggaggagccagaagacggagggacccagacaaggacaggaggacacgaggacggcccgagccccgaaggaagagagggagccgcaggagagacaagaaaaagacggaaaaagaaaggaacaaaagcagagcaaaagaaagacgggacaaagaaagacggggagaaaagaacaaggggaggcacaggagagggcaaggacaaggggcaagacggcagggcaacgacacagcggagacacagagaaaggagccagggagagagccccagagaccaacgaaggcaccaaaggagcaagggggaaaggccccgggggggaccaccgggcggagcggcaaagagagaggcgagcaagccaggagaagcaagccagaaggaacacccccaggcccgcacagcccgccccaccgcgagccagccgacccgggagaacagcagaggaaggaagccgaaaaacccccccccacgccggcagcgggcaggaaagaaacccgacagacagcacacagcacggcaccagcccacccacgcggccgccccgaggcagcgcagagacaaggccgccaccgccccccaggcccaaaaaacccaaccacagggcgaccagcaccaaaccacaacgggagaggcgagagcgggcggccggacagaccagcccaccacccgcaggccggcgccgagaagcccaccccaggcggggagagggcggagcgcgcgggccgcagagcacccacccagcaccacccgcgcgggagaagaagccccccgccgcggagcgcggcaccgcaccccccagcacacacagagacaggcaacccacccccacacaagaaaaaggaagggaaacccaaagagaagaaacacaaaaacgaggagggaacaaggaggggaaaagaagcaacaagccagagagggcaggggggcgcaaaaaacgaaagggaacaggaggggccgagcccgcaaaagcagcccaacccacagggaagagagaacagcgaaaaagggggcgggacagccaacacacagagaagcacccaggcaagcccaggcgcccggagaaagagaagggcaaaccacgaccaagaaagagacagcgccacaaaaacaaaaagcagggaggaggaaacaccaagagaagaagacaaaggagcagacaacgacaaaaaccgaaaaaaagacaaaaagaaaaagaaaacgggaaaacccaaaaagcacagccagacaaagcgccaacagcgccaaaaaacacaacaggaagaaagccaggaaaaggacagcaacgccaagaccgacacccaaggagcaaggagagggagaacacaaaaggggaaaagggcacaaaaagcaaagccgacagcgaaaacaggaaagaacgaaagagacaggacagaaaaagagcgaaagaaagaccagaacggagaggccaaccaaccgcgccacagcaagggcgcacagcggccagcccagagaggagaaagcacccacagacagagggggacaggcaaacacgggaagaccggacccaacacgaacagaaccgacaagaacaggagggacgacaccaagcaaaccccccacaaaaaagccacgcccaaaagaaaaaaaaaagagaccagagaacgacccaagacccgagcaagacacaccagaaaggaacccaaaagcgcaaccccacaaacacacaagaggcgagaaagccaaggcggccaaaagaagcggaccaaaaagggggcccacaaaggagagcgcagccccaaaaggaccagggaccaagaaagagacacgggggaggccccccacggacaaacaccacaaacacgggaggaggcacggggcacgagaaagcccgaccaccaaaaacccggccgaccacagcgcccccaccccccccaaccgccaccaaacagaccaggacaagaggaacagagagggacacacaacaaaacaaaagcacaggcaggaaagaaggaaaaccagaaaagcgacccaccacaaaacacaaaacagccaaaaaaccagacagcacacacaaagcaacaaaaaaagaagagacgaaagacgccgaggaagcagaggcacagcacagaacggcacaagagaaaagaagagaaagaaaaacacaaaaggacaagaaagacaaagcagaagccccaggaaaagaggcaagcaaaggaaaagaaaaaccacccacagagggcaacaaaacgaccagaagcagcacaaaggagaaccaaggcaaccgccgcagaacgcaagagacggccagggcaaaggaaagagaacgaaaagagcaggagcagccaaagcccccggccgcgcccggaaacggggaacaagcaaaaccaagcagggagcacacaccaagcacagagcgcgcgaaacgggggggggggggggggggcagggggcggcagcccaaaggcgccagggacgcagcaagcgagacgcaccgaccccaaaagcacaaccacagagagcgcgcagggaccaggaacgggaaccagaggagaagccccgcgcccgaagcgaagcccggccgggaggggcgggccgcggcgggagggaacgagagaaaaagaggagaggcccagggcgggcggagaaaaacaagggagaaaaacaagaagaaagagaagacgaaaaacgggcagaaggaccggcagcgcgcccggccaggggcgcggcaagacagggaagggaggcagaggaaaccaggaggccccccccaccacggggcgaggagaaagcggccacacaaacaagcacaccaggccaaaacagccacaagaagagggagagagagggacaaggggggggaaagagaggagagagagagagagagagagagagagagagagagagagagagagagagagagagacccaaagaagaaggggggacaggcacaggaaaggggaagcgagcccaagacgggaaaggggcggcggcaacaggggaaggcgcgcgccagggccacaggcagaggaccggacccacaggccagggaggaagcaggcacagacggcaggcggggcaagcgccgagagccacccaggccggggcgcgaaacgcaaccgaaccacaagaacccggacgggggggcccccacagagagcgaaccgcaagcccccaacacccagagacacagccaagacacaagacaggagaaacaaaagaaaaacaagagccagaaaagaaccaagcaaggagcagacacgccagagacggagaagaagcaaagaagagcaagaggccacagaccaagggaagaggcaaaaaccccgaggagcaccgggcgccagcacaaagaagaacaacaggcaggaagcagaaacagaaaaacaaggaaagcaagaggccggagaagaggcgaagaagggaagaagagaagaagaagccagagacaaagcgcaacagaccagccagaccccggcgcggaggccagcaaagacacccagggaaaaaaaccccacaagccaccacaggcaaaaaaccagggagaaaacaaagacagaacagccgcggaagcacagcaaacagaaaggagccacgacgagcagaaacagcccaagacaccagcccgaccgaaaaagccaagaccaacaccaagagaaagagacagcgcaagaacaaacaaccgaaaaaggaagaaaccgaaaaggacaagagaagaaccgaaacggcacaaaaaaacccccacgacccgggcaccgccaaaaaggggagcagggagaagcaagagacgcggaaccaagcagaaaaaagcagaaggcacagaaaccgggaagccgaaaagagccaaaaaaaaaaggcaaacaaaacgcggaggcgagagacagagggggcggaggaaggaagcagagaggggcccaaggaggcccccaaaaggaagcaacaagagcgaaagagcagaaaagcagccgacggcccgggcgagaaccgggcaaggccgagacagggaggcggagcaggcggccaaagaagggccaaggggccccgaagacgcaacaacccgaaccaaggcaacggacacagaacaggacgaaaccccggcccgaaaacgggaccgagggcacagcccagaaccggcaaggcccccaggcgaaacaaaacaccccaaccagaaagacaaaccagggagagacaccacggcgccgaagagcgccgcacgggacccaaggcccaaccccaggcagcgggcccggagaccccccgcccccagaaagagcccccaaagcacgcgggggcggagcccggagccaaacccccaccaagcaagcggggggaccaaacacccacggcacagacaaacaaacccgaccccagaagagaaacaagagaccgcgcgcccccaaggcgggaaaggcagcacgccaccacccagaccaagagccacggccaggaaagcaaacaggcgggccaaacagccacgccgccggagaggcaaacaagaaaagcacaaaaggaaaaacagggccgcagagagccagcagaagaacaccaggaccgcagagggccggacgccccagcacaccccggcagccacccccccagaggaggagccccccggcccgcaggcacaggcaggcaaacaaacaaacaaacaaacaaacaaaaaaagccaaaaagaaaaaaacaaaacccaacacacaaaaaaaaagaacacagaaaagaacgaaaaacaaaaaaaaaaagaaagacaaagcccagaaaacagcacgaagcaggaaagaccgcccacccagaacacaaaaagcccggcaaacagaacaagcgaccagcgagagaagcaccgacccacaccacacgagcacaaagacacaaaggagggcccgcccccgccagcagaacgccgaaacgaaaaacagccggcccagcagaggaaccccagcagacgcacagcagggaacaccaccagcccagcgggaccagcaagcacgcccgaagaaccgagaggcaagcagcacgacccaaggacacacgcacgacacgcgccgaaggagccgaaagccaccgccagcacaacacagaggcacagcgaagaaacacgacagacagcaaaacagaaacccacgccagaaccaaaaccggagccaagagagagaaggcacgaacggaaaaaacagaagccgaaaaagagagaaccagccacccgcaaccagacacaccagcaggggcagcggagacagaacacacgaagaagacaaaaccacagacgacaaaacaccacagaaaaaagaaaaaaagaacagacacaaacaagcccacgcacaacaacagagaccaaacgacccaaaaagagcaagcaaagcagcgaagcacagccaaccgaggagcacagagcaaagaccccaaggagcaaaaaacccagacagcgccccgacagaggagacaagaagcccacgcaacggcggaccccggcccaaccacagaaagccagccccaaaaaggacagagaggacaaaaccaccccccccccgaacgccaaacgcaaagaaaagacacagagaaaggaaaaaacgggaaagcaccgaggagggggcaagagggaggaggccgaggaacgaggggcaaggcacccagcgaccacagacgccgacgcagcagggaaaaggccaccagccagcccccggaacaaagagacccccgagggcagcagacggcccaaagccacaccgagacagcccgccaaaacacaccccacaacagaaaaggcacagcacagaccaacacagaggcaggaaaaagccccagggaacccagagacccaaaggaccaaccaaccagccccacaccaaacccaaagaggcaaacgcgacaacagagagcagccaggggaagggagaaccaaaggcaaagagggggaagcacacccgagaacagcaagaaagagccaagggagaggacgaacacacccagcgccaggaaacaggagccgccagcaagaggacgcacccggggcacagaagagcaaaaaggaacaaaaagcacagccacaggcaaaacaaaagcagaaaacgaaggccaaaaaaaaagagaaaagcaaagccagaagaaaaccaaaccagagagcgccgcccaaggcaaaagacgaggaaaagagagacgaagagacaacaacagacaacgcaagcccgaggcaacgcccgccgcagcacgcccccaaaagggaaaaacacagacggggccaagcagagggcaaccgaaaaggaaaaaacgggggaacaaaagaggacaaaccacacgaagacaccccgcaaaaagccgcaaagaccccaaggaggcgggcaggacgaaaaacagagacgagccacccagacaaggccggcaaccacaccaaggaggccgccaaggcaaccacgcccaaaccagcaacagcggccccgggcggccccaccccgaacgcacgggacaacaacgcaacgaaaaagggggaggggaaaaaaacacaacgaaaaaggcacgccgacagccgaaacccaggcaaacaaaacaaggcagaacagagacgagaaagacgaggggagggaagcaagaagacgcaacacacaaggaaccggcacacgggggcacgaagggcccaaaaccaaccgcacccagagggagaccaacaagagggaacagagcaaaagcgccaggggcaacaacccaacaaacaacacacacccagagagaaagccggagagaggaacaggcagcagccgacccaggcgcaggggaccagacggaccggcccgaggaaagccacgccgagggggggccagcccccgccccggacggggggggccaagggaggaacggggaaaccagagaaaagaaacgaaagaggaggcccaacaagggcccccgagggcacgagggcacccacgagggcgccccccaccccaacccggaaccccgcccccgaccaaaacaggggcccagagcacacccccgggagccaacccagcccagcacccaaccgcaagcccccaaaaccccacacccggaccagcaagcccaaagacccggaggcgggagacaggaacaaggaggacgagggaagacccgaaacaccacccgacaaaaccaacaggaaaacagaaaaacaaaacaaaaacaaaagaccacgaagaagcagagcgcaacccccccccgcccccacagggaaaggcggggccccccgcaaacacacaaaacggcgcgaacaccaccgacccaccccaagccagacaaagcacaaggcgagccagacccccagaagcgccggaccgcggaagcggcaccccccagaaaaccccaggaacgaagccgggcccccgcagcacagggcccacaagccaccagagcaaaaagaaggaccgaaccggacccgggcagacgcacaacacagaggaaggcacgaagcacacagcaagcacagaagccagcagaagggacacaaggagagcgccaggcccgccacccagagggcgggagcgcgaaccccagagaaggaggggaccaagagagaacaaagaagcacaaccaaggagaaaccacggaacgggagaacacccaaaaacagaaaaccaccacagacaaagcggccgcgcaaaaagggaaacaacaagaaaagagcgggagaagggacgcgggggaaaacggccaggcccacaggaacccgccaccccccacagaccacagcaaagacaggaaaacaccaaagcccacgaagacgaccgacgaagcaccaccaggcgggcgccaagccacaggcccagggagacaagcaccgccagaagaccggcacaccacccaaccacacggcagaggccaagaaaccgagaccgggaaccagacgggggggggggggggggggggcggggggggcggggggcgggccgggggcggggggcgggccgggggcgggggggagcagaaccaacccaggaagcccgaaaaaaccacacagcaagaaaaaaagcaggccagagggcagacaacacaaaaaaaccccagcacagacccgacgggccaggcgccacggcccccccccaccccccccgccccccacgcccccaaagacccgccaccccccccacgcccaacacaggcagccagaccacaaaagagaagacacagagacaccgagaccgacaacgccacagaggcaaaccccgagaaagcagaaaacacagcaacaaacaacacaggacaaccacaacaaccaaacagcacccaggcagaaacaaaaaagagaaaacaagaaaggcacacacaaagcaacgcccaaacccaggagagcaagagccagacacaggagccagaaaagacgaaacacgaggaaggcggaagagccgaaaaaagggaagcaagggacaacaagcaacagccaaaggaacaccagagcagcaaccgggagcaaaaagaaggaaaaaggccaaaagagaaaaggaaagaaccaaaggcccaagaacaagccgggacaagggaaaagagaacgcagaaaccaggagagacaaaaccaagcacccccaaagagagggacagaggcagcccccaggggcgcagaaccagcacggcagaaacacaagaaaccggaagagccggacagagcagacggaggaaggagggacagggcccccaccccgccgagggagcgcacgaccagcgcccaaacccgagcgaccccgccagacagacgaacgaacagaacaaaaaacccccaagcgcgccaagaaacagagcaacggaaaaggaacaagcaaacgcaaaggggacaccaacaacaaaggcacccagagaagcgagggcagggcccagcagaagcggaagcccagagcgcaacgagcggaagccagaagcccggaaagcaccgggccggccacaaaaagcagggcggaaaagccagaagaggcgagcagcaagggccccgcagaagaaggggaagacagaggcacacacagccccggacccaacgggacccaaagagccgcgaggacgccacccaccacagaacccggaaagcccggggagcaaaccgcaagaagcaagaggacaacggggcaaaagaaggcaccaaaccagaacagcaaggaaaacaggagagaacgacaaagcaaagaccgaaaggagggaacccagaagaaaccccgaagggcgccaggacaggccaacgggaccaccaggcacaggcaccaaacccgccagacacaagacgccaggagcccagacaggaaggcgcccgaaaggccaccagcagcgaggaaacagagcagaacacagccaacaggacgaggcgcggggacccgaggaagagaggggagagacgaaggagcaaaggggaggcaacccaggaggaccaacaggcaacaaccaaacccgggagccccgagacaagccaacaacaaagaccaacaaaagcaaccccaggcacagagcagagaacgcgcggcccagggagaggcgcaccaaccgagagacgagccccagggaaggaaggagggaggagcaaagaggaggggcacacccagagacaaagggaagagggaaggaagaaaaaccgggaggcaggacgggagggggcaacacggaagaaaaaaaaaaaaagaaaaacaaagcccaaagggggcaaggcaacccgcagggcaaaaaacgacgagggaagggcccagaccacggagggcaccacccagggcggggccgggccaaagaaagcagggagcaagannnnnnnnnnnnnnnnnnnnnnnnnnnnnnnnnnnnnnnnnnnnnnnnnnnnnnnnnnnnnnnnnnnnnnnnnnnnnnnnnnnnnnnnnnnnnnnnnnnnnnnnnnnnnnnnnnnnnnnnnnnnnnnnnnnnnnnnnnnnnnnnnnnnnnnnnnnnnnnnnnnnnnnnnnnnnnnnnnnnnnnnnnnnnnnnnnnnnnnnnnnnnnnnnnnnnnnnnnnnnnnnnnnnnnnnnnnnnnnnnnnnnnnnnnnnnnnnnnnnnnnnnnnnnnnnnnnnnnnnnnnnnnnnnnnnnnnnnnnnnnnnnnnnnnnnnnnnnnnnnnnnnnnnnnnnnnnnnnnnnnnnnnnnnnnnnnnnnnnnnnnnnnnnnnnnnnnnnnnnnnnnnnnnnnnnnnnnnnnnnnnnnnnnnnnnnnnnnnnnnnnnnnnnnnnnnnnnnnnnnnnnnnnnnnnnnnnnnnnnnnnnnnnnnnnnnnnnnnnnnnnnnnnnnnnnnnnnnnnnnnnnnnnnnnnnnnnnnnnnnnnnnnnnnnnnnnnnnnnnnnnnnnnnnnnnnnnnnnnnnnnnnnnnnnnnnnnnnnnnnnnnnnnnnnnnnnnnnnnnnnnnnnnnnnnnnnnnnnnnnnnnnnnnnnnnnnnnnnnnnnnnnnnnnnnnnnnnnnnnnnnnnnnnnnnnnnnnnnnnnnnnnnnnnnnnnnaagacgacacccacgcaaaccgggcagggcaaaaggaaggaggaaacggccaaggaacgaggccgcaggaggcacccaggaggcaagccaaaggacagaacggcccaaggggaaccaccccaaccaacccagggacccaggccggaccggaggggaggacgcagcacgacgggcaagcaggaaccgcaccgagaccccagccgacggggagcgcacagacgccgaccccagacaacccagggccccggacagccccaaagaccggacggcaacccaccgggggcccgaacaagggaacccaagggccagggaccggccgacaagggagaggccaaagccccacacacacaagagggaaacagagcgccggggggggaccagggcacgcgggggagaacgggaagaagcaagagcggcggcagcacccggaccgggagcgggcgccgacgggcgccccgaaagccgggcagacgccgggagaccagcccgggaggaaggcaggagagcggacacagggcacccggacacagacagaaacgggaggcaccggcgcccagccggccgaggccggagggccccgggccaggaagagcaaaaggggcaccggcccaggagagcccccgggagaccagccccccagcagggggaggagagcgagcacaggacagcgggcaaaaggaaacggaagggacaaaagaaaacgaggagaggaaagccacccacgcaagagaaaagacaagagaaggaaaacaagagacaagagacaagcagcaacaaccacaaaaaacgagacgacgagaccagcacacacagagaaacacaggaaagcgcacacaaaaaaaagaaccggaaggaaccaagaacaaaaacaagcacgacaaagaaaaaagaacaaaaacgaaaaagccaggcagggggcacacgccaacccagcacgggaggcagaggcaggcggacgagcgaggccagccggaacaaaggagcaggacagccagggcaacagagaaacccgccgaaaaaaccaaaccccccaaaaaaaaaaaaaaaaaaacgaaacaagaaagaacaaggaccgacaaaaagaaaaaagacgaaacaagccaaccaaagaaaacgacagcaaagcggacagcaccccagggcagaagagcggcagcgaagcgacggcacagccccagcaaaaccccccaacccgaccagaagcacacaaggaacacacggaggaaaaccgcagacaagccgcacaacccaaagccagcacccccagggaggcgaaacccggagagagccaaccgaagaaaggccagccaccgcaaaggagacaacagggcggaaacggaaagcaggaggaagcaaaccagaggcagagaaaagaaacgcaagacccaaaaaaaaagaaaaaaagaaccccgagggaagaggaggaaacgaaaaccggaaaaagagggggggnnnnnnnnnnnnnnnnnnnnnnnnnnnnnnnnnnnnnnnnnnnnnnnnnnnnnnnnnnnnnnnnnnnnnnnnnnnnnnnnnnnnnnnnnnnnnnnnnnnnnnnnnnnnnnnnnnnnnnnnnnnnnnnnnnnnnnnnnnnnnnnnnnnnnnnnnnnnnnnnnnnnnnnnnnnnnnnnnnnnnnnnnnnnnnnnnnnnnnnnnnnnnnnnnnnnnnnnnnnnnnnnnnnnnnnnnnnnnnnnnnnnnnnnnnnnnnnnnnnnnnnnnnnnnnnnnnnnnnnnnnnnnnnnnnnnnnnnnnnnnnnnnnnnnnnnnnnnnnnnnnnnnnnnnnnnnnnnnnnnnnnnnnnnnnnnnnnnnnnnnnnnnnnnnnnnnnnnnnnnnnnnnnnnnnnnnnnnnnnnnnnnnnnnnnnnnnnnnnnnnnnnnnaaaaagaggggggcggggcccacggggaggacaggagcagcagacgcagggcaccccacccaacgcaaaccgcccacaaacccaggccacaaaaaaagagaaccaggacgacggggccgcaaaggccccggggaccccaccaccccacacagacagccaccacagaagaaaacccagagagggcaaacccccaaacacgcgcacaagcgagggcccccagaccaaagcccagagccccacaccaacagggaaaaaaaaacacccaccccccgcccacacgccagccacaaccagagggagggcaggagacaaccaagcaagcggaaaaccaccgggagaggaaacaaacacacacccagaagagaacaacaaaggcaaaaaaaggaaccagagccaccggcaaaccaagagcggggacaaggagaagaaacaacccaaagacagggcacagcaaaaccaccacacggggcaaccccggaaagcggaaaccagagcacagaaaacaggcggggggggccccagcgcgagccaccaggaagcgcccgcgccacaccagggcccaaccggagcggaccccgcaaaccacccagaaaagacaagacaaacagagcagaaagagggaagagcagaaaaaaaagggagggcaccagacagagggcgcagcaagaaaaggagagcacgcagcagcacagcggcgccccaggcagcccagcgggccggcccggcagggacgggcgagccccaggacgccaggagaacgccagcacgaaaagcggaggaagagcccagaaccggcacaagggccccgaagccaaagaccccagaccccgcccaaccccaagcaggaacacccccaagagcaaggaaccagaaggaaccagaacaggaacgcaacagagcgcaagcagagacagagcaagaacccaggaggccccagccccaggagaaccagggcagacaaggcaaggggggggggggcagggggggccgggagaggggnnnnnnnnnnnnnnnnnnnnnnnnnnnnnnnnnnnnnnnnnnnnnnnnnnnnnnnnnnnnnnnnnnnnnnnnnnnnnnnnnnnnnnnnnnnnnnnnnnnnnnnnnnnnnnnnnnnnnnnnnnnnnnnnnnnnnnnnnnnnnnnnnnnnnnnnnnnnnnnnnnnnnnnnnnnnnnnnnnnnnnnnnnnnnnnnnnnnnnnnnnnnnnnnnnnnnnnnnnnnnnnnnnnnnnnnnnnnnnnnnnnnnnnnnnnnnnnnnnnnnnnnnnnnnnnnnnnnnnnnnnnnnnnnnnnnnnnnnnnnnnnnnnnnnnnnnnnnnnnnnnnnnnnnnnnnnnnnnnnnnnnnnnnnnnnnnnnnnnnnnnnnnnnnnnnnnnnnnnnnnnnnnnnnnnnnnnnnnnnnnnnnnnnnnnnnnnnnnnnnnnnnnnnnnnnnnnnnnnnnnnnnnnnnnnnnnnnnnnnnnnnnnnnnnnnnnnnnnnnnnnnnnnnnnnnnnnnnnnnnnnnnnnnnnnnnnnnnnnnnnnnnnnnnnnnnnnnnnnnnnnnnnnnnnnnnnnnnnnnnnnnnnnnnnnnnnnnnnnnnnnnnnnnnnnnnnnnnnnnnnnnnnnnnnnnnnnnnnnnnnnnnnnnnnnnnggggggggcaagagaggggaaggaaagggggggggaggcgggaccaacgagccaggccggccccggcccagagccccgagagggagcacccagacgaaagaagaagcgagggagcagagccaccacccgacgaacgccaaagacaaacagccacacaccgcaaaagaaagaagagccgcaaaacaacacaaagaaacgaaagcgccgcccccgggccggccaagagcaggcaggcacagccggcacaagccccaaacccagaggcaggaaggcaaagacagcgaacaaaaaggacccaaagaaacgaacggaaccccagggcgggcaagaagaaggaggaaaagagaaggcgccaggagaggggaggccaccccaaaacaccaaaacccacaaaaaacacaccgccacagcagaaccacgggcccggaggcaaagcaggcaggagagcgacgcccgcaagcgcaccgggcgaaaaaaagaaagaggacggcacacagcagggccaaaggcgccgcagcgaggaaaaccacaaaggcagcagagcacaaaagcaagggggggggggggggacagaggcgccacaaaggagaagcagagagggggacccacacccccccccccacccgaagaggcggagggacacacggcacaaccaaagcccgacacgcgccccacaaggcaccggcgaggcgaccggaaggcaagagcccccaccccgggcaccaggagcggccagcaaggggaagagccggcacacaaacagaggcaccgcaggaggccacaggcgcaaggcacaggcccacgccaaagaggcgagcgacgcagagagcacacgccgccacgcggaccaagaggaaagaggcaggggacaggggccacaaccaacacaaaaccccaagcgagccgacaaaacagagcagcacaaaagggcccccccccccagaaaaggagcgacacagcacagcccaaaaggaggggaacaaaccgacacaccaagcgaggcacggaggcgccggcaggggaaacggccagcaaaagcaggcccccacaggcaaagggcccaaagcaaaaccaggcccgggaaaaagaaagaaggggaaaagcaagccggacggcaggaaggaaaacagagacgcgaccgggcgcaaacgagggagcgcaacccccagcagccggaaagccagaaccagaaggggacaaggaaagaaaggccaggagaaaaggaagcgaccaagaaggcaaagggaaaaaacagagagaacaaaacaaagagaaacaaaaaaaacggagccgaaacaggaagagggacagcaaaacccacaacaagaagccaaggcgccaggagacagggacggaaccaccaacagaagcaaaagaaccgaagagcgcacaaaaaaaaaaaaaaaaaaaccgcagaccaggcaaagggagaaaaagcccacacccgaaaacaacaccaaaagaggaaacacaacccagacacaaccggcgcggcccacacaacagaacagccggaaaagaccagccacccagagagcaaagagacaacaaaaaacaaaaagaacccccacaacacacgaaagacaaagacacagacaaaagagcagaaaaggcgacaaaacgacaccccagaaaaagcccggagaaagggaacaagaaaaaaagcaacaaaaaaggcagagaagcccaagcaccacaacaaaggagagaaaccaaagcaaccaaaaaacaggagcaagacaagggccaccaccccaaacacaaaagcaggaagcacagcagaagaaacgaaggagaccaagggaacaaaagaaaaaaaaacaaaacgcaggaaagaccaaaggacccaaaaacaccaggaaacccaccagcaaaaagcggaaaaaaaccacaaacagagccagaaagacagacgagaaagaaacagggaagaaccacaaaagcccaaaaaaaaaaacgaggaaaccaagaagcaacgaaagacgaaacaaaaacagaaaaagaagaacaaaagaggaacgacccccagggagaacagaggaaaaagaaaaaggccaacaccacaagaacacagacaggcaacccccaaaaccagcacgccacagaacgaaaagaaacagagcaaggaaacaacagcacacacacacacacacacacacacacacaaaagcaggaagccaaaaaccgaacaaaagaacgagaggacagcagacagaccaagagacaagagcaaacaaaaaaacaggggagacacaagagaacaccacagggaacaaagaagacccagacaaaaccaggcacccggaccccggcaaaagaagccaaaagacacaggggcaagaaaaagacaacaccaacaaagaggggcaaacggaggcacagaaaagaaaccaaacagaccaaaaccaccgcacaaaaccagcccaaaggacaacagaagccagaacacgaaccgaagaagagaaagacaggaagccagaacccagcacagagaagacgaacagaaaccaagcagggcacaagacaacaaaaagaggaacacaaaacaaaaccggagcaaagaaccacacgaagaaacagcagccccaaaaggaaaaaaaaaaccaacgacgccaaagagcaaacaaaaaaaaagaaacaagaaaacagccgacaaaaaaggggacagacaaacagagaaccaacaaaggaaaccaaggggagaaaacaacacaaaaccaagaacaccagcaaagagaaagaaacaaaacacgagaccccaaaccggcaggcacaggcagacagaaaacaaagacagacagcggcaaggagggagaagagggacgccaccacgcggagggaggacagacgacaccacacagaaaccaggggcagcccaggaggagagacagcacccaggaccaacgagacccgaacagggggggacaggagggcccaagaccagcgaccaagcggccacagggagggcacacgggaggggaccgggagagggggcgggaggaaggcacggggggcaggcgagccaagcgaggcaggcagggacacaagccagcgccggcacaagaaaggagagcaccccagaaccagcgcggagcgccagccccaccagagagggacaaacccgaaacaaagccagcccacaaagggggggaaaaagcgacgcagggcccacagcaaggaaaccaaacaagacaaggacacccaaaggagccaccaccacaaaaacaccgccaacaaacagcgcaccaaaaagccagaaagaacaacagagccccaacagaagaaggaaaagaaaagggacgcaagcacaccacaaaacagaagcaggcacaggaaaagggggacagaaaaggaaaccaccccgaggagaaaaagaaaaaaaaaaccgaaggagaaccagacccagaaagcaagaagagcaaggaagagcaaaacaaaaaaccaaacacagcgcagagccacagaagagccaagagaggcgacccaggggagggggcagaagaccccgggaaaggagaaagaaagagaagggggaagggggagggcaggaaaaggggaggggaaaggagaggcagggaagggaaaggggaggaaagcaaaaaagagcacagggaaaagaagaccaaacagaagcgcaaaaaaaaggaaaaaggcgcacagaaagccaaacaagggggagacagcgccacaacggacccacaagaagccagacggcacggggacaagagaggcaaccaaagccacccagagaaccacaaagcacccagagcacgccaagacgggaggaacagacaccacaaagacaaggcaggaaaaaggaaaaagcagcacaccacgcgccgagacgcacccagcaaaacaaggacgagacagcccagcagggaagacagcaaggaagccgagcaaacgaaaaaaaggcagaccaagaaaaaaggcgaggggaacaagaaccggggccagacacaaacggggggaaaaagggggccgagaaagacagcaaaaaagacaaagcacgagggcaaaacgaaccccaaaaagcccccagcacacagggagagggaagacagagccagaaggaagggaaagaagagagggaaggcacacccccaggcccggcccagaagccacgaaaaacaaagggcccccaccagcaaggcccagaaagaaaaagcaaccaaagaacagaaaacacacacaacaaaaaaaaaggcggccaacaaaaagaaaacacaagaaaaacccaaagagaagggcaagggagaaagcaacaccaaaggcacaggcagacaaaccaaagaaagcacgagcgaagagggccaaggaaggcacggcccaccgggacagccgccccaggggcagagggcagaacaggagccaacagacagagcaacgcggcagccagggcagaggagagaagagagagaacgccccccgaggacagagacaagaaggaaagcaaaccaggcagaagggcgcaacaagaggaccagcaaaaaaccccaagcaaaaacaacaagaagaaccagaaacagaaagcagacaacaacagagagggacaggcagaaacaccaaccgaccagaaaacacaacacacacacagccacaaaacaacccagggaagaacacaagcaccaggcaaggaagcacacaaccgagagacacaaaagaaggcagggagagaacaaaggaagaagggaaagcaaaagacaggcgcaaggcacaaacaaggcaaggaagcacgggggcaaggaagagggacgcagaagcacgggggcgaggaagagggacacagaaaacaagcacgacggggagacaacgaaggcgaaaccacagggcaacaccacagagacaaacgcccacccaagagcccgcggaggacagggagagaccgagcccagagaaggacacgaagcaaagccgggacagcagaaacagcacacgaacccaggagaaacagaacacggaacagaggaggacacacaagaaggaacaaaaacaagcagaacgcccaaacaaacacagcagaaaaaacagccaaaagccaacagaaaacaacggcacacgcagcaaagggaagagccagagaaagagagggaaagcagacagaaaccagcaagaacaacggaaaaaggaacgggcaaaaagaggcagcaaagcaagccagacagaggcaccagggccggggaaagacaaacgaagaacaaaagaagagcacgcccaaacaaggaaaaccacaggaaccgaaccaaaccagggagcgagacggaggagcaaaaaacgggccaaaacaacagcccagggaagagaccaaaaagaagggaagaaagaaggcacacacacacacacacacacacacacacacacacacacacacacaccacaccaggagggggaggagagagaacagaagggagacaaccaaccagaagagaaggcaccccacaacacaaaagacaaaaaagcgaagagcaacgaggcggaccccgggagcccagaagcgagccaccacccaaagaacaacaggggcagaggagaccccggcacaagagagagggcaacccagagccagggcccccaacaaccaaagggggcgcccaaagcgaggcgacggggaaccagagcagggcgcccacggcccagaggagaggagagccaaccgcagcgcgacagggcgggggacaccggggggccccccgagaggagaaaggggggaggaagaaggaagggaccggagaaggggacggagggggcagcaagaagaaacaaaaagaaaaaagaaaaacgaaccaaaggagcagcggaaggcgggaaaggccagcaccccggccaccccacagaagcaaaccagcgccaaccaaaggccgccccccccgaaaaggacaacacccaacaaggaacaaaaagaaaggcaaaaaacaaacgaaaaaaaacggcaagggcgacaaccaagcaagacagccaaccccagaccaccaaagcacaaacccccaacaggcaaccaacccagaaccggcaaccccgaccgccgagcagaagacgaccaggcccacagcaggaacaacacagaggagaaaacccaaaccaagaacaccagcaagcagcacccagaccaaaggccggaaaccgcgcgaagcagcccgggcaaacaggggccacgagggaaaaagcccaacccagagaacacagaacaccgggaggcaggcacaaaagcccagcccgaacccaccaccacccaaaggcgggacggggcggccaccacacccagcgacacagcgacgcagacagaggcggccgggcaggcccaaagccccggcagaggcacacaagcaaagacggagagaagagacccccggcccaacaccccagacacggcagacaggagggcgaccgcgcagcggccccgggccagagcaaggcccaggagagccaaccccgccgcagcccccgcccaaggaaacaccccccccacacggggaagcacaggcgaggagaggaaacaaacaccagcaaaacgacccgccacaccaaagccaagggcagaacaccgacacgggcacgccgcgcgggccacagccgcccgggccacagccaggaagagggcggccccggggcggggcaaaccaacggcacaacagcagaccaaacacaagagagcaagagcaagggaagaagacaggaaaacaaaggcgacaaagaacaagcaagcccagagcccaccgccaacaaagacggcacgacacccacgggagaacacccgcgaaaaggggagaccagggccaccacgcagaggacagagacccgaggcccgggcaccacaagcccgcaaaaggccaagccgaaagaaaaagggcacacagggcaaaaaaccagagagcaaacaaagacgggcaacggagaggccgagaagaagccccacacaagaaccgagagacgaacacaggccgcaagaagcaaggggaggaaaaaaaagcaacgggacagaagaaggcagcaagggaggggcccaccccaccccacccgccccccaacacaagcaagaaagacaaggccacgcacgcggcaaagagaaacaaacccagggcgagaaacaagcgcgaaaacacgacccaaagaaacacgcaacaccgagaacacaaggagaacagagccaagagaccaaacagacgaggaggaagggaagcaaggagacggaaaacaaggcacgcccacccagccgggcaaagcaagaaacaaaacagaggaaagaaaagagaggggaacacaacaagagaacaacaacgaaaacagaaaagaaaagacaaaggcacccagaagcggagccaagaacaagaaaagaaaacagacgagaaaaaccccaaagagaggacaaaggaaagaagaaaacagggaaaacccaaccagacaaaaaaaaaaaaaaaaaagaaaagaaaggcacaacaaaccgggaacaacccgccgcagacacggacccaaaagcgagagcaaaaaggcagcagccacaaccaaaacagcccaggagcaagggcgcaggggcgaacccaaagagcaaaagaaagagcgaaaacgaggcggaggaagcgagagaagaaggaaaccccggccaaaacccccaaccccgcacggaaaaccccacccccaccacccccccaggccaagccccagccccacgcgggccaccagaccacgcggcacaaggaaacgagcccaggggagggacggaggacaagaaaccaggccagcccagcaagagagcaagacaagacccccaaagacacacccaaagaaaaaaacaagagggcaaccacgggacagcgggacccaccacgaggaggggaaccagagaagggagccagacacggggcaagacaccaccaccgaaaaagagacacagcagcacgagcacacggccggaaagccacagaacacaaagaaaaacccaaacagagaacgccacaaacaggaaacagaagaaaaaccaggaccagccggccccacacccacagaaacaccacggggcaaaaccaaccagaccagggccccaaccccaagcgagacccaaacagcccccagaaggaccccgacagaaaaaggcacccaaacaacgcacgagagcaaagaaaacggcgaggcgggcaccccaaagggagaacagacaaagcgggccgacacgaagagagaaacacaaaaacaagcgaaccaccccgccagacacaccaaggacagaaggcacagaaggcgacaaaagccccagggaagaagccagggcaacgcccaaaccccaacaaagccgacaacaaagggccagcggaggcccaggcagaccccagagacacacccagcgaccagacacgagccaggacaggaccgagcacgaaaggggcccacacggccaccaacccgagccccccccacagaagacccacaaaacaacgccccgcgcggggaagaacggcagcaggacggcgggagcagacacaaggcaacgccccagaagcaccgaaacgacaggggaccgcgggggcacgccacaccacaggcagccagcagccagaaacacaggacaaaagagcagcccaaaccaaaaaccaggccagccccaaaaaaacaccacccaaaagagaaaaaagggagccaggcacaacggacagaaaagcaaaaaaagaaaaaaagaagcaaacccagcagaagacccgaagggcacggacaaaaccaacaggcgggcaccacccaggcaaaggcccgaagcagaagagagagggagcggaaacaaaagcgcacacaccaggaaaaagaaggaccacaaaaggaaaagacccacaacaccaaagagggaaacaaaacagcacaacacccaaagaggaaaaacaacacaagaaaaaaaagccgcccaaggcaggcaagagaacacgcaaaaacacacacgaacaaagggaaaaacaagcaaaccaccagaaaaaaccgcgggggaggaggacagaggaaacggagcaaaacaccacacaaacaagacaggacaacaaacaaagagcaaaaccagacaaaaacaacaacgaaaaccagccaaaaagcccaaggagccaacacagagacacaaccccaaaaccaccgccccgcgacacgcacagcacaggaaggggacgcggacgagaaacacagcgcagcgccacaccccgacagccaacgagccagagagggcccggacacaccagaagccaacaaaaaaagacccggcgaggccccgcacgccgacgagaagagaaggcgagcagggacacccagccacagaaagcaaaagaggagcagcagcacaggcagccgggagaggacagggggccacccgggcacagcagcagagcaacaggaaggagccaagagccaacgggagggccgcacagcaaggagggggcagaggggcagaggcaagacgggccagaagggagaaggggaaaaagggcagagagccaggcggagaccgcagaaggggaaggagccagagaagagaagacccagggagcagccggggcaagagccaaaagcccccaccaagagcggacaccgccgcgcgacgcgcgcgcgccacgcgcacacacgaagcgcgccgcagcccaaggggaaacgaaggacaaacgcgccaaggccagggcgaaagaagaggacaagccgaccgaggcccaagccaaaaccgacaaaaacggagcaacagaccccagcccaggcagagagcgaaggcgagcgcaaccagcgccggcccggaacaagggccaggagccagcgcgaaaggcccccacacgaccagaaaaaaaaacccagcagagacgaacacgagaagacccagcaaaagacaacaaaggaggaaagaaaaaaaaaaaaaaaaaaaaaaacaaggccggaacacaaagaacaaccagaaaggaaaaagacacaccgagcgaggaggcagagaaaagccaacaggaaagcagccgcagggagggggacgagaagcaaagcagagaagaaggcggagcaggcgagggaaacagcccggaaggccccgcagaggcccagaagaaaagaggggcccgagggcaggcccaaaccacaacagaaaggcccagaagccaaggggacagaaacacgcgaaggcaagagcccccaacccgcggcaagacacaacggacagggcgggacaggagggaccccaagaacaccaaagggccagacaaaaggcaccacagcaaagagaaagaacaggcgaccgaaaagccccccaaacaaccaccagaggagaagcccacagacgacaagcggagacaagaaaaacacaaaaagaacgcaacaaagagggggcaaaacagagccgagaccgcacgacaccgccaaaagcaaacgagaaacaagacgaaaaagaaacccaaccagggaagcgggagcccaggagaggaagcggaccccgaaaagccaagaggaaccgccagacgaccagaggggaccagcgaacccaccagcaaggaggaggccccccacaccgccagcacgcgcacagaggacagccacgacggggaggggaaccagggggagcaccgagaaaggaggaacacagggcccagccacggacccaggagaacgaggcgaccccaaaagggagacggagccacccgagcacaaaggaaagccgcacgaaggaggaaagacaccaacgggggccgcgcaaaaacacaaaaagaggaagccagggccaggaagccggagaggaggggggagcagggcagggggagggaaggaggcggggaaacagaaagaaagaagaaaaacaaaaaaaaagaaaaagaaacccggcaaacggcagacccgggggggcaacgccaacaaaaagcaggacaaaccaaacggaagaccgagcagcaaagaaggacaggacaaagaagaacagcaagaagccggggaaggaaaaagaaaccaaagcaagaaaaaacaagaggggagagggacgggcaaaaacccaaccacacacagcccaggggacgggaccacaacacaaaacaacggcggagaaacaaagaaaaaacagccacaaacaacaaaaagcgcgaaagcaagaacgcaacaagcgccaacacaagacaaggcacagggcaaagaaaaacacaaaggaaaagggccagaaacagcaagcccccaacaacaaaccacgagaaggaaccagccaaaaggacccaaagccagaaaaacgggaagaagcgccaaaagcagaagaaaccaaagacaaaacagaaaaacaacccagggacgggggggcaacaggccaccagacaaggcacaagaaaaaaaaacacacagcaaaccccaaagagaagcaaaaacagaaacaaaacaaacaaaaagaaaaagggagaaaaaaaaaccagaaaaagaaaaagcgacgagcaaacacaaaacagagaacaagacagggcagcacagacaaacaacagaacaacccgaagcacagggggcacacaacaacacacaccacaagcgcgaccaaaaacgacgagacaggacaggaaaaaaacaccggggaagagaacaaggagggacaagaagccaaaaaccagaaccgcaaaggaaagcagggacaaagagagagcagagacgaagaaaaggcaccagagacgcccaccgggaccacccaagcagccaccaaacccagacacagcagagccaagaagccgcgacaggagccggaagcaccccgaaaggccgccagagccgacaaaacagaggggagccgcagccaccaaaacgagcaggggacccaaggaagagaggggaaggacgaaggagcgaagaggcgcaaccccaaggaagaacaacagacaacaaccagaacccccagagccccagggacaagccaccaaccaaggaggcacaggagggacccggcccaggaagagcagaggaggccgaccgccacaaaggaggggaggcccggccaggaggcgagccccagcagagggggagcagggcgggaggcaggagcagggggggaggggagcacccaagaggcaggggaagggggaggggagagggagagaaggggaaacgggaagaagggacaacagaaagaaaaaaaaaaaaccaaaaaaaagaaaaacaaaaaaagaaaaaagaaaaaaaagaacccccccaaaccagaagaacaagaagccacgaccaccaaagcccaagaaaaaggagcaccaaggcaccgccgcaagacgggagcaccgcgaaaacaagggaaacgccaagagaaacggcagaaagaagagaaggccgaagaagacagaaaggagcagccgaaggcagaacaccccaccaacgcgcagggccgccccagcaggacacccaacgaggggcagggcccaggggaaagcagcgaaagaaaccagcacccaagcccagacggagagaaagcaaaggcaaaagaaacccgcaaaaaaacaagagcaaaagaaaaggaaaaaaaacacaaacggcaacaaaaaggagaaagaggaacccaaacggaggaaaaaccaagggccagagaacacagcaacaagaagagaacaaaagaagccaaaaaaaagggaccaaggggcaaacagcagagaaaaaaggcaacccacaaaaacgaaaaagaaaagaacaaaccaggaagaaagaaaacgcaaacaaagagaaacaagcaaaccagccaaaaaaagggcaagaagagaaaaaacacccaaagaaaagaacacacacacaacaaaagccacagaaaaaaagccaacccaaaacaaaagaaaaaacaaacaaagggacagagcaaccccaggaggggcaaaaaggagaaggaaaagagaaagcggcagccggggaaaaaaagggaacgcagaaaaacccgagccggaaaaaaagcaagaagaaaggacaagagaaaccccccgaaagcaggagaacccaacgacaaaccaaccgcggaagaagcaagaggaagccacgggggcgggacccacgaggggggcgacgcacgaggggaaggaccaccaaagggggcagcaccacacaggcaggcccgaccgaacaaggagagcaaacagcgagcacaagcaagccaggagcacagacccgcccgcccgacgggagaggacagcgcgagcgcgaccccaaaaagaggaaccaacacaacggaagaggcaacccccgggcggcagggcacagcgacggaaaaaaagaacggaagggacagaagcaaaagaggcacaccaagcacagaagcaacaacaacgccaacagggagagagcccaggcgcccacagacagggacaggaaaggccaagcacaggaaaaaggcgaaggcaagccgggggacgagaacaagcaaaaaaaaaagaaacacaaaaaaaaacaaagacaaagaggacagaaggcaaacacacaacggaccagacacaaacccacaccaggcacggcagagagcaacgaaggacaggaaaggcgagacaagggcccgccccggcacgcccccaaagcaagcaaaaccagaacacccccaaggaagagaaggacaaaggcccccccagagacagccaaaaaccccaaagacacccccccccgaaggcgccacagaagagccgcccagacccaggacgcaagaccgagcagaggccagagccccaaccaaaacccacacgcgcaggcccgcggcagcagcccaggccaggaaccaagcacaaaaacagacagccccggccggcaggccccagaagcacgaaacacaacgacaaacgaagacccaccgcgccaacaggaggcgcgaccaccagggcggaaaacagcaagacacccaacccaaaaccagaggagagagagaggggagccaaggggacagggaaaagagggcaaaaccagcgagaagacagaaagagggaggggaaacacacaaaacagacgcaagcacaagcgggggcacggacaaagaaagccagcagggcaccacaggaaagaaaaaaggccaggagagaccagaaagggcgcgcaacgaagacgagcaagccgggagccagaggggaagagagcccgacaccacgcagggccagggacccacaacacaaacaacaaaacaaaaaaacaaaacaaaaggaagagaagaaaaaaaagacaccccaaaaaaaagcccggggcagaagaagaaggacggaagagaacacaaaaagcaggaaaacaaaaaagggcgcagccccagaaagggaggaaggagagggaaagcaagaaaaaacacacagcgagaggaaagcagagaaaaaaaaggaaaaaaaaaaccgggccaaagcccaaaacggggacagaaagccccgaaagggaccgaccagcccccggaccacgcagaggcaggcaggagagaggggaacacaaccccgaggagcgaggcccgcaaacccagggaaggggagaaaaaaccacccaaagccagcaggaagcccacagaggacagcaaaaaggaccacagccagaaagcacgaagagaaagagggacccacgcgggagcaggaagaccccgggcaaggggggcaaggaacgcgcaacaaaagcaacgaacacacaaccgaggggccgccggagcccacacgccccaacccggggcccagcggaccccacacgcccccccgggcaaaccccccccgaccaggggaggcccaggggaccagacaagggccacaccccggaaagggcaagaaaaaggcacaccacagcacgggccacaaaaccccggccccagaagccccgaccaaagccgacaggacagcagccgcccaccgggcacagaaacacgcacccgcccaagaccagcaaaagaaaaccccccggagagcacacaagagcagcccccacaccacccccgccaaaggaaggcgcccagcccaaccccacagagcagaagaagccagacaaggcagcagccagacagcaacccccccccccccgccaacccccccccaccccgcccccccccccaagacgaccaaggcaaaagaaacgaggaggggggcaccagcacacagccagagcacacacgaggagcaaagcgagaggcagacccggcaaaggccccgggacagggaccccgggagccagaggaagcgcaacaagaccacacgagggaagaaaagacaggagaggagccaaggcgaaaacccacaccaaaccacaggaaaagggccgcagagcagcgggcgaacccagaggccccgcagcgcacagaaaggacaccagaccccacagcaaggggcagacagaacacacgaccccagaaaccacacacggcggcaccaccgaaaccaagaaaacgaaggaaggcgcaaccaagaggacagaacaccgcaggaaaccaagcagcacaaggacgacgagaaaaagggagaaacaaccacaggaaaggccgggccaaaaacaagaagacgccagcgcacccggagcgacacagcgaggggccagagggcccacccgcccccccacgccacacaccccaccaagacaggcgcggaaacgaacccccacaaagaccccccaaaacccaagaagcaaaacaagaaaaaaaacaaccagaaaaacagacccgaggacagccaccaaagagacggagaaggggaaagcccaagcccaacccacacaaagaacacaggcaacaaggaagcgggggggggaaaagagacagaaagaggccaggaaagagcaaaccaagaaacagaccaaagacagccgaaaacagcaaaaaagcagagaacgagaagggaaaggaggaaaagacaacaaaagaaaagcaagaagaaaaacagaggcagaagaaaaagaacaagaggaaggagggggacagaggaaagagaaggcagaaaaaaaaacaaaaacaagaaaaaaacaaaaaaaagagcaaagcaaggaaccaaaaaaggaaaaagaggcaaaccgaaacgagaaaacacaccacacgacaaagaacagaagacacaaaaaagagaagcgccaaagcaagggccccgaaacggccaagacacgaccagagggacaacaccaacaccaagagccacaaagagacaaccagaagccccagaaagccacaggcccgcaccacaaccccccccccaaacccaaccacaccccaacgcaagaccaggccgccaggggggccgaaagaaagcacaaaaaaaacccacaggaaaaaaacgcagcgaaagacgcacgccccaggaaaccaagcaggggcaacacccccccgacgcagagacacagcgcaagcgcgcccaacagagcaagaaacgaccaacgcaagacaaaagagacgaagcacaaggaccgagagcaaaaacgaaagagaacgaccccaacaaagaaaaacacagacaagaggcgaaaacagaaaagcaaaccaaaaacacaagacagcggccaccgagcagagaagcgcaggggaaggaacacagagaaacacacggcaaaggggaaaaaagacaaggccacagccaaacagggcacacacccggccgaggcacagggaaccacagagaagagaaaaaggagaagagcgaagaagggaagaagcacaaaaacgcagagacacaaaacgagcaaccagacgcacagcagcaacacaccagcaggagaggcccccaacccacaggaaaaaggaggcacccagaagcccacacccggggaggaaggagaacagcgagaagggcaggacacacgcggccacggggagcaagaggaagaaggggccaaagggaaaggaggaaggacagaaggaaacaaaggggaaaagagacagaagaacagaagaggcagccgaacacaccaccccacagggaggcaggggcaagccgagggagacagaaggcaaggcgcccgcgacgacaccccaaggccgaacaagggcgccaaagcgagggcaagccacgacaggaaacaagagaaacaggccagggggcaggaaaaccgaaccaaaacgaggcccaaggcacagccacgaagcgaacgaaaaaaagccaaaaaaacagggggcacgcacaaaacgggagcaaaggcacaaaaaacaccaaaagccacacaaaaaccccaccacagagaacccacaaggccagccacaagaccgccggaacgggccagggacagcaagaggcaccaaaacacgagaaagccgaagcacaaagagcccgccgggagcacagcgaaagcagcacggggagggagacaagagcaaggaaggggaacagagacccaagaagaaagaagggaggaaaggagggggagagagagaaaaaaaaaaggaggggagaaggaaggaagggaggggggaggcagggaaagagggagggagaaaaagaagaagggagaaaaaagaaaggaagggaaaaggaaaagaaagaagggaggagggagaaagggaaggagggggaaaacaccaaaaaaacaacagacaaaaacaaaaagaaaacagggaaaaaaccccgcaggaaagggacacaaacagcgcgaaaaagaccacggcacagacacacacagaaaacggagcgcaggaaaaaaacagagaaaaagcgacaacagacgggaagagaaacgcccgggaaaaaaagggggggggacacaaaaaccagacaggccccaaaccaagaaaggccgccaaagaccaggagaaggccgagacaagaacagaggcaccgcaacaccacacacccacccggccaaacaagccagagaggcgccacgggcacacaaaaaagacaagaaggaaagaaacaacacacacacacacacacacacacacacacacacacacacacacacacacaccccaccccaagcagcagaagagggggaaagaggaacaccgcggacccccacggaggcaagcccccaaggcaccaacaggcagggggccaacacgacccgccagagcgaaacaccaggaaccagaaaacaggcaaaggagagggggacccagaaggcacaccccaccaaggaaggcacacccccaccaaggcaggaaaaaggggcacagagaaagggcaagggggagggggcgcagagaaaacgaacagccagcccacaacagaaaaaagcaacccaccaaaaaaaccaagccaggcccaccaagaaacaagaagaccggggccgggcaacaaagcagcgaacagaacgcaacacagaaagcaggggaaacagaccgccgccagaggcaagagcaaaaggagcagacccacgcaaagccaagaacaagaagagggggcgccaccacacccacaaggacgccagcaccacaccaagcaaaaacccaacaagcacgaggcaccgcggaaagagcaaagcgcaacacaaggggggggaaaaccggcaaaacaagaggcaagcgacacgcccccgagcacaccagcagaacaaggacaccacagaggggcgcaaccagcaagcaacacaagaggacaaagaacaccagagcccacaacagagaagcaaaagaaaagggccaaagcaaagcacaacagaagaaaacacacaagaaacacaggccagcaaccggaagagaacaaaggagaagaggcggcgaggcagcgagggcaagcaggacggggacgagggcacaagcaggaacaagcagaagcaaacgccagacccaggacagagcaagccaggggcaaagccaaaaagagccaccaaagaagggaacagccaaaaacagcaaacaaagccaaagaaaagcaggacgagaggaacccgggaaacacaaccaggaggaaaccacaccaggggaaggaaaaaaaaccagacaggggacaagccacaacagggagcaacagagaggacgcacggggcccacccccgccgaacaaaggaaaggaagaacgagccaggccaacggcccccaaggcaccccaaagcaacggacggagcaagagcgagcagcacggcgaggggcaggccagcacgacaaaacagggcagcccacagaaccgacaccccaaggaacaaaggccaaggaaaagagccacaaagggacagccaagagcgaaacagaaagaacaaaccgcccggaacgcccaaacacaaagcaggaggacggaccaagacaaaggaggaaggcgccagaacacacggaacaacaaaagggaaaaaaaaaaaaacaaccagagccccgcaacaccaaggcacacgacaagagcaacaacagaaaaccaaagaccagcacaaaaacagaaaacagaaaaaacgagaaaaggaagcaagaaccaagggagaccacacagcgggcagcaaccagacagaggggaaaaggaaggaaccagagagcgcccgccccgccccaagcaacccccacagcagaaccacagaaacgcaccagaaaaagaagcccaccagccccgcaagccgggccaaaccccccaagaaaggagaaaccccacacgccacaccaagggaaagccaggagacagcacaaaacaaaccaaccacaccaggccaggcgaggcggaaaagagcaaaggcaaacccaaccaaggaggcgaccaaagcacgaacaggccgagaccccaagcccgccacgaggacccagcccgacggaaagcacgcgccgcaaaacaccccccaagccaaaaaaacaaaaccgaagccccacacgaaagaaacaccaccacgccaggcggcccagacccaacggggcgcagccgcgccccccgggcagaccggaacaggggcgacaaaggagcaagagaacaagaagacccacgaaggaagccaccgcaaacaaaccacagaaaaagagaacaaagccagcgggagcccagaaaacaaccagagaaagccagaggacaacagacgacacagaacacagaacgcagaggacaaggacccagaaacagaacaaaaaaaaaaaaaaaaaaaaaaaaaaaaaaaaaacagaaggagaaagaagggaggggaaaacaacacgccccagaacgcggcagacaaagacaaaagaaagacaaggagaaaagcacaaaaaagagaccaaagcgagggcacccaaaaagcccagccgggcagggggcgcacaccaacccagcacgggaggcaggggcaggagaagagcgaggccagccgcacaaaggagccaggacagccagggcacacagagaaacacaccgaaaaaccaaaaccaaaacaaaaacaaaaacaaaaacaaaaacaaaacaaaacaaaacgcaggagagagaaaacaaggccagcccaagaaaagcccaaggcacagacacacaaccgaagaccgcgagagagcgcacaaaaacaaagaaagggccagacagcgggccgaacggcagacaaggagacgaacccagcccgccccccaagcgggaaggggaggccagggcagacgaggcgagcgaagccaacaaagccacagcgagggacaagcgccgaccacgaaacgccccagcccagggacgcaagcacccgggggggggggggannnnnnnnnnnnnnnnnnnnnnnnnnnnnnnnnnnnnnnnnnnnnnnnnnnnnnnnnnnnnnnnnnnnnnnnnnnnnnnnnnnnnnnnnnnnnnnnnnnngaacagaccccagaaaaaccagaaccaccggcgaacgggggaaccacgggaggacccgggcgcagaaaaccaacaagcagggggggggggagaggcgccagggccagggcaacacagaaagacaaaagggaccaccacaggaagagccaacagaaaagagcaccagcacacggagagagagcgggaacgacgagagaggcccaccccgcccgacgcaacaaagcccgaaaggcgagccacacgcggaaacgagaaacagggccaaagcaaggcaaaacagggggggaacagaagcacgggagggagccaaggcccagggggacaagcaacgccacccccagaagagaggaggaaagaaagcacaccccaaggcacagagcgagaaaaagagccgaaaaaggcgagcaaaagagggcaagaaagaagaaaaacagccggggggaggacaaaaacaaagcacgacgcccaaaaagcaccacaagaggacgccgaaaaaggggaggggggcccgaaaaacaggccacgggggggaaaaaaccacagaaacgaaccccaacaaagaaagccagacacccacaaagaaggaaacggggggagcccgaaaaagcaaagcaaaagcagcggcagggaaaacccgccaaaaggaacagaacccacaacccccaaacagcggcaaaagaaggaaggaggacagcaccgaggagagaacagccacaccagaagcaaacacgcccgcccccgacaacaggcaccaggacaaccgaccaagagggcccagccagagcacgaaaccacagggcggccgcaaaaacggcaaagagagcggggggagccgggggggggggggggaagaaacaccacccccccagagggggaccacggccaggaacgaaacagccggcgccggcaaggaaacagaaaaaagcaggcccaggaggggccggccgcgggccagccgcgaaagcagccgcggggaacccagccggagacaggcgggcgccgaggcaaggcagaaggcagcaagggaggacccagcgggggggcccccccgggagccagaaaagggagagggcccccaacccgagccggcccccccgagccgacgcaagccagcgggccccgcagggagcgccccccacgcccacacgggacaccacaccaggaaaggcaccacagacagggcgccccacaacaaagaagcccggggacaggacagaggaagaagaggcacaagccagcaagcaaggacaaagcacacgaaagccaccaagagagagaaaaggaacgggcccgcgcacagcacccaagagaggaacaggccagggaaagcagagaggaaaacagaccccggaaccagcgcaacaaccgcggccacaacgggggccaaaaaccgggccccaggaccgaaacaccaaccgccgggggcaccggggccagaaaaacgcaacacagaacaggcagcaagccccagagacagcagcacgggcaccacacaccgggcaaaaaggaaccagcgggggacaagaggcacagacaacacaacacaagaaaaggacaaagagcggagggcaagagaaggcaggccacagagggaagggcaccggaccgaaaaggcggaacaaggcccccgcgcgcagaagcagagacccacccccgacgacaagccggaacaaccaacaaaaagcaaggacagcgacccccggcggagcaaaaaaaaccccccaacccaggacacgcaggaaaggcagaaacaccaggccccagggcaaccgaaaagacaaaagggaaaaaaaaagagaaacagaggagccagacccagccccaacaaacagggagccaagcaaagcacgaccaaaaaagaaagagagagcaggacgggggagccaaagagaccagaaggcgaaacaagagggccacaagcccaaacggcgagcacaagaagccaggcaaccgagcacagaaaaaacaaacaaacaaaagcaaagaggggagccgaacggaaagccgccgcccaggaagggcagacaaagacacaaccaaagacccagcaccccgcccgaggacagagcagccgcacccaggcaggcggacaaacgccgcaaccaccagggggacccagccccgccgaccccagggcagcacacccaggcagccgcacagacaaaacaaaaacaaaaaagcaagaaaaacaacacccagagagaaagaaagcaaggccccgagaaagaccacggaggagagaagccagcaaacaaagcgaagacgggccagaagagaaagcaacacccccccccccccgccaccgcaggcaacaacgagagagacagagaaaggaggaaaagggaaaaagcaaaagaacaaaagcgaaaaacaaaagcagaaacagcaagcagaaaaacagccaaaccgcacagcaaaccaggacaccaccaaagcagagacaaaaagaacgccaaaggaaacccagcagagaagagaacccgcacaccgcccgcccgggaaagacaagagggaagcgacacaggcccaaaacgggggcaggagcgagcaggaacacgccaccacccccccacccccccccccacagggcaagaaaaagcagaaccgaaacaggccggaaccaacgccaagccagggccgacgagcacagcgcaacaaagaacgcaaaccgcccagagggaaaagggacccaaaagagaggacagggcaggggacagcggagggagaaagggccaggaaccacgaggacccacacgcaccaggcaaaggcaacaaaggcgagaaagacaggacgcaagcccagaagaaacacagcccaccacaaaaagcagacaaggaaacccagcaccccacaaggggaagcgggcacagagcaggaacccagagaccaacggcgcaggcaaagcgccacgagccacaccccagcggcaccaacggacaaccagcagagaccccacggcaagggcaaaacggaggccgcaagacagcaaaaccgccaggaaccaacacggcccaggacacggaggcgccagccagaacggcgaggagagcacagccggcagagggaggaggcagagagaagcggaaagcggggcggaacaccgggaggaagaaaagcacgaccaagcacggaaaccgacaagccaggaggccgacaagcaggaaccacccggcagaggaggcagacccaaacaaagggagaaaagaacaggcggaggcagacaaccccagaaaacacacacacacagcacaaaagagcgagagccccaacccagagcaccggaagcagaacacaagaccgggcaggccaccagggagaacaacaagggaagagccagcaagccaaagggcaaaacgcccagaaaagaacaggagaaaggaacaggcagagccagcccagagccagcggccccaaacaccgccaaacacaaaacaggaaaaaaggacaaagggccgagcaacaccccgggccgggccccacacccgcacccgcgccggaagcccacaccacacaacaaaggaaggggaaaacgacaggcaagaagcaagaaaagacacaaggggcgggcgggagcccaaagaccggagcaacccagaaggccaagagcagaggcaaggcgacgagcaggcaaggaggcccggagaacaaggcaccacaagcaccaccaggcagggcgcaaagggaaacccacaccggagacaaacccaccccccacgagcccgggaaaagcacgccgcgcgaaagccccaggacacacaagcaggggcgcaccaaacgaacacccagcaagccgagccggcagacaacggcaaacccgcaaaggggcacacgcccgcgccaccccgcccaaagaccaaacagccaggaagaagcgcagcagaggcacagagacgccaaagcccacgcccaacaaccagcaaagaaagcacaaccagacaaggaagacggaagcaaagaggacagcgcacaaaggacagcccaacagaacaagagcaagacagccgaagaggaagggcaggcgagcaaagcagaggcaaccacggcggcacccgggcaacacagcacacccgagaagcaagaagagaaagcaagagaagaagaggcagcacaaacgccacacaggacagaccccccaccaccccacgcgcacccgcccgccccgcccccaggggcaccagcagccgggagcccacacggcagcccagagcgcaaggagggggcggggaacacagcagcggggcgagcagcgaggcgggaggaaacccaccggcggaagggacaccggagaagacagggaagcaaggaagcacaaagaaaaagcgaaaaaggcaaggaaaccaacccaggaaggcaagaacagcagccaggagaaaacaaaccccgagggcagcccgccccagcaggccccacaaagacaccaccccaaagaccccagaaaccaagccgaacaaagagcgagagggaaaagcaaaaccaaacaaaagaggcagacaaaaacacaaaagggcaaagccaacccccagccagagcaaagaggggggggaggggggagaggaaaggacaagaggaagaggaccgagaaaaaggggacgacaaacaccacagagcagcaacagcaaggcaaacagcaaacgcaaacagcagcaggacggaccacaacagcagcagggcggaccacaagcaccagcagggcggaccacaagaaacggacacgcgagcagcacaagcgagaaaagaagaagcaagagcaagcaaagaggcaagcagcagcagaaaccaagaaagcccaggcgccggaagcacaacaagcacggacgggagaccagcaaagcacgcaaggccaaccaagcaagagcaccccgcagcggagcagcagacaaacacacccagcaaaacacaaagacagccaaaaagaaaaaagaaaacaaaacacacacacaagaaccaaagaaaccagaaaccacaacccccccaaaaaaaaaaaaaaaaaaaccaaaaaacacgacaacacaccaagagaaaaacccaagaaccaaaaacagaacacacgcaaaaaaacagcaaacaaaggcaaacaaggcaacaaaacaaccaaagcaaaaaaaagagagaaaacaacaaaacacaccacaaaaaaaacaaaacaaccaaacacaaaaaaaaaaaacaaaaaacacaacagcagcccagacaaaccaaaacaaccaccaccagagaacaacgaacacacaaacaaccaaaaccaccacccaacaagggacaggaagacagagcccgcaaggggaagaaccgggagacaagaagaaaaaaagagcgaaaaaaagcagggcagcccagaccagccgggcgaccagcagaacgagcgagccagcagggccagcaggaccacaggggcagccccgaaggaagagcgagagaaacagaacagagacagcgagaagaacaccgggcggcggaagacaccagccagcgagaggagaggcagacaacaaaggggaaaccaacaccgagaacaaggcaaaccagccccacaacacagcaggccaccaacgcagcacaccaagcaggggccaccccggcaaaacccaggcccagagcggccccaccaaaaagaaaaagagaacagagaacaagcccggaggaccccgaaaagcccaaggacaaggcccaaccgcagcacaggcagacgggccacccgggacaccagaacgaaccacacaccccacaagacaaaaaaaccaggaccacaccaccccacaaacaaagccaggaaggccacaccccccagcgcagaagagcccaaaacaggaggaccgggcaccgccaaaacccccaggccagagcaagggccaaccccaagcgcagacagacagcagggaaacccagccagccagaaacgcagcaaagcaacaaagaaacacggcgagaccaggcaaccccacacgcccaaggagacagagccacagggagaacagggcagcaggaaagccaaagcacaagagagaacccaggcccgcaaaggcgagcgcagggcgcgccaacaaaccgaagccgggccgcaaaggccgggccagcgccaacgaggccaacgggcaacaaggcaggaagaaaacgaaagacagggcccagaaccaccacacccaccagagaacaaccacaagaaccaagaaaaggaaacagaagggggacagggacaggaaggggggcgcaccggaccccaccccacacggacgccccggcagcacagacaagaccaaaaaaggcacagggagagcagaggcaggaacggaagagacagagcccacgaggcacagccagaaaagcaggggaagggaagagcgaaagaagagagggggaagagaggggaaagaagacgaccgcacagaggagcggacaccaacaagaccagacagcgacaagcaggaagacacagcaacacacagggcacacacaagaagcagacggccaccacagagagaaaagcgaccaggagagagcaagaacaaaagcaaaagaacaggagggaaaaagaaaaaagaagcggaaccaacgggccccaacacaccgaaacaaaacaaagggaggaacgaaacagcacaccaaacccaaccaaaagcaacccacaaaaaaaaaacgaagagagaaagaagaacagacaaaagaacagggaaacccaagaaaaaaaaagaacagagaagcccaaaaaaaaaagcaaaacacggacaccacaagcaggcaggccccacggcggcaggggcaggaggccgccagaaaagcagggaggaggggacagggagacaggaaaccaaaagcaaacgaagcggagagggcagcccacccacaaagagagaagagcagccaacccagcacaaaggacaagggcgcaaaagggccaacgggaaaaggaaaaaccaaaaaaacgcccagaaaggaccggacaagacacgcaaaaaacacgaaccccaaaaagggccagcaaccagaccacaccagcaaacgacaaccgaccaaccccaggcggacaaaacgagcagcccggaaaagaacgcgaaaccaggagagaaggccccacaggccagcgaaccaggcaagcggggcgacaggacgagaacagagagaggcggcgaagaaaagggcacagaaaaagcccgggaaaaccaccggccccccacgcgccgccacagaaaaagccacgccccaacacacaaacgagagcaaaacgcccccccagcaggggagcacagcaaaaacaaccaaacagccaaccaagccggcagcccgagaagaacaggccggagagcagggagcagccgcgaccagcccaggcaccccaaagaccgcacccaaaagaccaaaggcaagccgacgagccggaagaggcgaggcagagcgcgggccaaaaggggcaggcccacccgcagccccggaacgagaagagacggacagagccaacacagagggccaacagaagcacagaaggggggagcaagagggggcagagaacagccagagaccagaagaaggcaggaagccgcccgcccccagcccaacccacgcaagaggcccgccccaacgcaagaagcaacagcagaacacaggaccccgaccccccgcccacaggcagaggacagccacaggccaggcccaccgacaggggagggacaagccaggccagcgaacagcccagaccacaagcaaccccaaaccccaggagggggcaggcaggcggggggggggggggaagagcaaacggggggaacaagacaacaagccgaagagaagacacagagcaaagggagggcagacagagggcgcagagcggcaccaggggccggacgggccacagaggccagaaagaagacgggaccccagaagagacaaagggagccacggagggcgagaaggagccaggcccggaagagcagccaggcaaccaccaagccaccccagcgaccagaaagaaaacaaaagccaccaaaagagaaccagaacagcacaccaccaaacagacaaaaacacgacaaaccaagagagaacaaagcccagggaaagcccacagggcaggagacagaccagaaaaaggaaggcagacacaaaaacaaaaacgaagacggcagaagggggggggagcggccgaaaggccacaaaacgaaacaaaaggcagaagacaggccccgagcagggaggccgaacgcgaaacaagagaaagcccagcaccgccccccccaaaggacaagggaccacaggccagcgaaaagcacgagaggggcccgaaagcccaccagccaggcaacacagcacgaaccagcgccgccccccgggggaagcgcaccaccccaggcagccagacaggcgcgaaaacgcagccgcagcacaggaaggaacccggagaggaagaggcaagccacgcaccgcaaaaagacaaaacgaccaaaaaaaaaggcaacaacaaagaaagaacaggaaggaaagcccagacaagcccaaaaagcacaaagagaacgaaaggcggaacaagaaacacacagacaaaccccccccccaaaggaacaaaggccacagagacgcagcaagaagggagggccaagaaacaccaggaaaaagcgaaacgcaccacacaaaggagaaaaacaaaagcacggaaaaaagacgaagaccggaaagaccagacgcacaaaaaacagacacgggagaaagacaaaacaaccggcagaaaaacaaccaaagaaagaggaaaaaacagaaaaggacaccaaccgccagagcagaaagaagagaaagcagagaggggaagaaccaccccccgcaaccgaccccacaaaaaaaaaaaaaaaaaaaacagcagaaacgaagcacaggaagaaccaacgaaagaaacaaaaaagaaaaaaaagagcaaagcaagacaaagcacacgaagaaaagagaaaagcaaaaaacaagaagaaaaagcaagagcaagagaaagggccaaaaaaagggaaaaagaaaaaacagggcagacgcacacagacgaaagaagaaacgcacaacaagagacagggcagaacccaaagaaacaaaagccacaaacaaagcagagcaaagcaagcaagaacacaccaaaaccacgaacaaaggcgcgaccccgccaagcacgaaaaacaacacagcagggcccaaacacaaacaaaagaaaaagacagcaaaaaaagagaaagcaaagggggaggaaagaacaacgccagcacgaaggcgacaagggggacggcgagagacggagcagagcccaacagaccacaggagagcccaggcggcacaaagacaaccccgccgccccagggcggaagacaaaggcacaggaaaaagaggcaggggaacagggcccaggacacccaggacaggcaggcaaaggacaccagagacaacacgaacacaaacaaaacagcgacgcgaagaaaaccacccaaacaaaaaaagcgaaacaccagcaaagaaccaaagcacacaaagccacaacaaaaagaagagaaaacaaaccaaaaccaaaaagcagaagagacggcgacaaaggacaaaacacgcagcaaaccacaggaaaagaagaaaaacaagaaaccaaaggacacgcggagccaaaaaagaaaaagagcgcaaacccaggcagggcacagccaagaaagagaaaagcgaaaaagaccacaaacagaaacacagagacaaacaacaaacccaacacggggaaacaaaccacgagccgccaggggagcaaaagcgggacaagggccagagcagagcaccagaaacaaaagggaggaaaaaaaaaaaaacccgagggccacaaaacgaaacaacacacccccccccccagacacccgccagcggcaacaacaagcgccagcgcgcccacacaaaaacaaaccaggagcggaaaacacaaacacacaaggcccaagcccagcgaggccacccaacccacacacaacacaaagggaagacgcacacacaagcccaacgcacccagcacaaaaaccagaaagaacagaaagacggcgaacaggaccgaaaaacaaagaaaccaggaaacaaccaacccagccggccaggagcgccggcgaaccggaagccgcggagcaccgacagacaggcccggcaaccacagcggaacaggcaagaagaggcacccccacggacaggaggaaaaaacgcgccagcacaaagaagacgccaccgcaaagaaaacaccacaaagaagccccaacacagcaaaaagcaccggaggagagggccacggaaaaaaggcccccaaccaccccgaccacagcacccagaggaaaggccggcccgaccagccaaagcggcggcaagcagcggaggaaaagccccggacgcgggagaccgccccccaagcgcccccgcaggcaagagaggcccgcggcaggaccggcagggggggagggggagggggaggggggagggcgcagccaggcaaaaaccagcggcccggacgagcgacagagcggagaggaaccaggcggagcgccgagcaggggcacaggcaccaggggcacgcaggggacggaagaaacaaccggcaaccggggaccggggaggcgcgaagggcgaacaaccccggagcgggccccgggaaccacagcacccagccccaggcgcaaagcgaggcgcgcaacagagccagagacccgagcaacccaggacagccccaggccaacccacgcagagaggaggcccggaacacccagccccccaacgcaaaggacacggacgcagcgccgcacgaagcagggagcaccggcaagacagacccgggcaaggagcccaacccgcgccgcagggcgaccaggcgccaaaaacgcacccaaagcgcgccgcgccgcgcaacgcccaccacacccccgaaccacccaccgccagagccaaggcaccggcagcaccaggccccggcgaggccccaggcgcagcagccagcccaaaagagccccacgcccagcacacggaggaccaggaagcaggcaacccgaaaggcgcgggcccagacgaacgacccccggaccgagcagggcgagcgcagagccggaaccgcaaggcaaaacaaccaggagaggagcgcaaaaggggcccaccggaccccagaaagaggccaaccggcgaagaagggggcaagcggcgccgcagcgaaaccagaaaaaaggaaagggggaacagaaaccgagacccaggacccaaaagcaacaaaggacggggggacccggaccgcacagacacgcacgggaaaggcaaagccagcaggaacagaaagcgagaagcacaaggcagcacggcacaccccaagcagaacacgacacccacccccacccaggcccagcaggcaccgaggaggagcaaaaccaggccccccgggcggcggcaaggccacggggcgccagccaggcagcgcccgggagggaccgcgaccgagggagaacccagaacagccggccagccgaaaggggacggcccccccaacccggcccgacaaagaagaaccaacagagcgcacagagacgaggaaccaaaaagaggccgcacgcagcgcaggcggcgccccacgaacccgaaagagacggcaccaaaaggaaacccagcgcagcacagaggcgagaaaagagaggaagggaccggacagcagggacagacaagagcaccaggcggaaaggcgccaggaacgcccccacccccccagcccgaagcacgagcccaaaagaccacccgacgcccacccggggggcggcaccacggaacccagggggcaacacgcaaaacccacaagggccagacaaccaaaaggagccgcggcggcaggagaggagccgaaaaaaaggcggaaaacccacccaggaaagccccggagccgaaggaaccccacggaggggagcaaagaagaccaagcccgcccagggcaaagcccgccagagagagcggaccagacaaaccaggcagaggagaaagcacacccaagccagccgaccgcggagaggacagaaagagcacgagacgggcagaacacgacccccagggacaaaccccccgagggggaccccgcgacgccagcggaggaaagaagaccccggcccgggagaaggcaagccagcgccaaggacagacaaaagccgccaagagacacgccaacagcgcaggaacaagccgggagagaggggaccagcgcagaggccacccgcccaagacacccagggacggccgcccgggcaaagagcaagagacaaaaacacgaaaaggaagggggcgggagcagggagcggcccagagaacgcacaggaacacagcaaacccaggcgacccagagccacggcgaacaagcccgcagacaggacccaggccggcacacacaacacacacacagcacacgcacacacaccacacacgaacccgaaccccgccgccagcgccgcccaggggcgggcaaaccggagcccagccacccgaggccaaagacgcccacccacccaacacacagggaacgaggcgaagaaggcagagcaccccagggaagcggaaccccaaagacgaccgagccgagacgcaacccaacccccaccacccccccccaaacccaaagacaaaacaggggggccccccccagcaagcaagaagaaagaaagacaaaaccaaaaacaacgcaaacgcaaaagaagaccccacagagcacaaaggcaaaaacgcagccaaagggcacagaaaccggaaagggcaaaaaacaaaaaacgaaagagaaaagaccaggaaaacaaccagcagcaaagcccaagccccgggaaccgccccgggcccggaccggccagagaccggcccacacgaaacagaagagaacaacccaaccaagccaaagaacgcgaggcgacccaggcaaccgccccccaaaggaagaggaaaagaaaagaagaggggagggcacagaagaaagaaagaacaaaacaacaacaaaaacaagaagccaggcaccgcgggagggcaacaaagggggccgggggcccgggccaagcagagggcccagggcggccccacaagaaagaaaggaaccgcaacgggacagcaaagcgcaccgcccgaagagaggcacgcacaaccagcccaggaagaaggagggcccgcccccacgcagcgcaaaaagcccccacgcaagaggagcaggcacacaccaaggcaggcaggaaacagcaaaccagagaagcgaagcaagccaggagagagagagaggcggggcaaggcagggccgaccccggacaacggggaaggggccggaccgcaacaagaccaaccgccaaaggccccaaccaaaggccgcaccgaaaaaagaacgacgagccgcccagcagagcgcacccggacaggagagagaccaagagaccaccaccaccgccaccaccaccaccacaggagagcgcgaaccggcccccacacagggcgaaggccagaagagccaggggaaagccccgagggcaggcgccaaggcgcaggagaaagcagcaagacaaaacaagaagcagcgcggagcaggaccagcaggcggcgaagacaacggacgcgaacgcaagaggagcacgaccgaacccgccaggaggcgcgcgaggcagcccacgccacgggccccgggcgcaagccccaagacgccaccgccggccagaaacacacccagccaccagccccggaggagagaagaggggggagagacacgggggacaccaccggccccacggggacgggggcacggccggccacccggcacacgcagccaacgcggcacccgggcacccaccgggcggcgcgcccccggcaagcccgcccccgccgcgacccccgccgaccaggcaccaccgccccccaccacgccaaggcgcccccacgccgcccgcgcacaagggcagcggcccagcacgggcggggcgcccgcccgcaccacgccagagccaccaccgccgcaccgccgcccccaccgccaacaggcccggccggcgaaccaaggacgccaaggagccacgggcggcccggccgggaggaggaagggagagcgaggcaggggcgcaggccgggccaggagggaaagggagacgccggccgcgggaggggggcgcgcggccccaggcccgccagcgcccacagaccagaccaggacccaccccagcggggcggccaaaaccaaacggaaaccagggagcgaaggggacggaacccgaagccggcagcagccccccagccacgccagaccacgggagccgcaaaacgcaggaacgagggacagggagaaaacgcaaaggaacggagggcccggcggcacggaggaaagaggcacccggcaaagcaaagaaaacacgagcagaacacagagccgcccaagacagagacaaggagagagagagagagagagagagagagagagagagagagagcgcagaaccaaggaccagcccagggcagaacccaggggccccacgcaaacaaggcaagaaaagcagcacgccaaagaacgcaaacagggcgggcaagcgccaccgaacaaggaaaggagccccaaagacccaaacgcggggaaaaagaaaagggggccagagcacagagacacaccaagaacaggaccccccaagcccagcgccgccccaaaccaccaacgagggcgccaaggggcccacacaaaaccgggcccccagaagcaccacccccgccaaaaacgcagcgggggggcggacccccagcgaaaacacacgggggggagggggcgccacaccgaacagcgaaagagggcccaaagacaaaccgcaaaacgaaagagaaaaaaaccaggcggagagacaaaaaaagagaaccaaaccggagcccgcaaaaacaaagagggggaaagaaacggggcccagacacggcgggaggggagggagaggaaggcccggcagaagaacagagaaaggaacaccggcaaccacgaaccaccgcccgaaggcgcaaagcacccccggagacccaccgcagcaaagaccccaagaccaagaaaaaaacgaaagagaacggaagccaaggggcaggaaggagagacgcagcagggacaagaaagaagcagaagaaccgcaaaggacccggcagccaggggccaaccagagacaagaaacaacaccaccagccgccgcggggaaagagggaacccaacacgcgaaggagcggagggaggcacccaagccgaaacccaaggacagaggaaccccgcagagagcggggaagccaaaagcgcgggcaccgaacaaacccagggcaacaaccaggcgccacccccaccaggaaacaccaaaaccaaagaaaggagagcggccagccagcaggaccacgggaaagaagagagagaaacgcggcgggacaggaaggcaggagggccgagccgcccggaaaagcaaacccagaaggccaggaaaaggacaaccaccgccggacccaaggccaggcagaagagcaaagagaacccgcccccccggcaggcggaaacccgccaaaacccccaaccagagcaccaccccccacgccgccccacaccgaccacgccccgcagcgagagggggaaacaaagccagcgacaagggagggccccgcgagcagacaaaggaagaaaagcgcccaagggacaccgaggaggaaagcgccggaggaagaaaccaacacaacacagccccagccgcaggagaacaagaagaggaggggagggacagcacaacaggaaggcaacacccgagcccgccaccacaagcggccagggaagacccaagcccaaagggcacccaggccagaaacgccaaaccccccccccccccccgggggggggggggggggggggggcagcacgaagcaaagggaacgaagcgacggcaggccaacaccagaacacggaaaaaaaaagacaaccccaaccaacacagaggagaccacaaaacccaaacccccagccaaaaacccgggccaggagaacaaaacgcaaaacagccaggaacaagaaaaggccacgggcgggacgaaacgaagacaaagccagagccccggggggaccggccgggggaggacaagcaacgcacaaccgaagcaaaccacaggaccacaccgaggggaaggaaaacagcgcagagagcgcgaagagacacaaccacaagacaagaagacaaacaacagaaacacaaccagaaacccaacccgaagagacgcagaaagaggaaaaaaacaccaaaaacccggagcgcagccacgacggaaccaagccccagaggaaaggaaaggaggggcgcaccaggccgcaccagaccccaaggaggccacccccccacaccacacccaaccagaggaaccgggaaagaaagacagccgggcgggcagccccgcacccagcacaagaacaggaagccagaccaaagccccccccaccccaccaagcccgggccccagaaccaaagcacagaccaccccacaggggaggccaggaacacagcagacccaagacggcccaggcccgagaagagacacgagagacccccccaccgcccgagacaaggcccaacgacccaaaggcggcccaggggaagccaaggcgcagccccaccgggcaggggacccaacggccaggaccagaacaggccagcccacacagagacagcgcccgggggccccaggcaggggagacaaacccagaacaggcccccgcagggcgccgccccaggcgagccacgggcagacccaccacccaggaaaggaaaagccagaaaaagcacggccaggcaccacccggccaccgagacggacagcgggccccaccaccaggagggaggaggggggaggaggagcagaggagggagagggaaagagggaaggagagaaagaggagaagagaaagaggaaaaaaggaaaagagcaccacagaagaccaggcggcccggaagaccagaccgaggagggcccggaggaggcagccccgagagcccaggagcgagcgggcccgaggagcacccaaccccagacacccgagcccgcccaggcggcgggagcgccagcgaggcaagagcccacccagcacaccgcggccccggaggggaggcaggggacccgagaagggagccagcacaggagcgggggcaagggcaacgcccggccgcaggcccgacggagggcgcgaggacaagggccgcgaccaggagccggcacggagcccaggcccagacccagagacgcagggcgacggggcgaaccaagggaacgcggcggaaccccacccagccaggcccagccccacgcccggcccagaagcaggccgggaggacgcagagaggagggacaggggacacaccaccccgaagaaccggcaacgcgcaaaccgggaaacagaaacgaagaggggccagcacggccacccaggccgccgacacaaagagaaaccgcggaggaagaaggacccgcccaggaacccagggcagggccccaccgggaacccaaggaaaagccccacgcggaaggaccggccaccaccgcgcccccccaaaaaacaaacagggaccgcggcaccagacggcaaagaagcccagaaggagggaccgcaggagaccaagaccagggagagcaccgggaggggaaggaacaagccgaaacccgaacaccgcggggcgagggaaaagagggcagcgcggcacgcaccgggaggcaggagcgggggcaggcaggaaaaggcggagcaggggaaagccccaaacgcaggcgcgcccccgacgacagggaagcgacccgcagcgagacccagacaagagccaggaccgaaagcacaacccccggacggaaaacgaaaacggccgacgggcaaggaggggcaaaacgccccaaccaagcgacacagaaaagagcccagcgcacagagcgaccccaccccaggacgccccgaccggcccaggagcgaagaacaggaaaccagcaaacgggaaccggggccaacgcacgagagcggaacacaaacacacggcaggcaccagaggagggcagcggaacgacgaacaacgagagaaaacaaaaaaaccccggcccgggaccagaaggcagcgcgaaacaccgcaaagcagacgaaaaacccaccagcaaagcgcagcaaaaagcagcgccccccacacagcccaccccaacccggagaaacaaggcccccccaaggcagagaggacagaaaccgagcccacaagggaaaaaacagaagagaggcggcagaacagccacaaggagagaaacgagagaaagcccagcggggcccccaacagcccaaagcacaccaaagagcaaacccaagcgaaaagaaaaaaaaaggaggaggaggaggaagaggaggaggaagaggaggaggaggaaaggaggaggaggaaggaggaggacagacagaggacaaggaggaggaggaggaggaaaggagggaggagagggagggaacaaaaggagaggcggcaacacccgcccgaggccaggaccacagaaaccaccggacgagcagcaggcggggacacaaaacaaccgaaccccccagaacaaaagcaaagcaggaccgaaggaccccccaaaaagccgagacaaaggcgcaaaccaccgcagagggacaggagccccaaagaacgaagcaaacccccgagaagcgcgcggcgccccaaagacagcgggcgcccagaaaacccagacaaaacaaaacccagaaaaaaccgcgcccagaaccaaagacccccccccccccccccccccccccccccccccccccgacgaacagccggaccagagaaggagaacccgggcgcaaccaagcagggagccacaaaagaaaaccagaccgcccccaccggcgaacacccagacacgaaaaacacccaacccgaacaaaagagcaacagaaaggcaggggacccccaacacaaggaaggaggagacagagagacaaggacagcaaacaaagagagaaacagagagacagaaaaaagagaacgaggagcaacgggacaaaaagagcaaaaaaacgggggggggggggagacagggccgaagcccggcgccggaaccacaggaggccaggcggcccaaaccagaaacgccgcccgcccccaaggcgggaaaaggcgggccaccacgcccagccaaaaagcaaagcagaagaaaagcaacaacaacaaaacggcaacaaacaggacgcaagcaaaacaagcaccccaaggaaaacacacacaacacacacgcaagaacaaagggaaaaaaagccaggacggccggggcccacaaaaaaaacgcgaaaaggaaagccaagccgcagaccagcaggaagcaacgacacagaagaaaccagccgggcaaacacaaaagcaaggggaacagcaagccaacaaagccaccaacagcccgaaggaagggccccgcccgccacagaggggacccgcaagaaagcaggaacaggagggaaggcagcgcaaagacagcaaggggaggggggccaaagggaccaaagaaggagcccaagggcacacagagggaggccagcaagcccccccaggggacagacaaaaaagccaccaaaaagcaaagcagaacggcgccgcccgcaagcgcgcccagccaggagaacgggaccccagcaggacagacggaaccgggcccagaaccgcccccagacccaggcccgcaggcccacagagcaagcagggccaggcagagacaaaacgaacaggaagccacccgcaacagggggaaaagaagcagaggagggcagccgcacgaaaaacggagaaaagagccgcagacccaggcaaagaggcacccagaaccagggacaaaacaaagccagccccccccggccaaggcccccaaaaaacaggaggaacccaaaccagcacgggccggcaccgcgaaaaggggcaggccaacgagcggccccgacaagaagagggaccagcacaagaacacagaaagagaaaacgggaaagcgggcacagcaaacaggcccccacacacaacagaacgggaaacacaaaacggagagacacagaaaggggaccagcacacccaaagcaagcaaagaggggacaagaccacgaggggcagagaacagagagaaaagaagaaaaggggagaagagggaaaggagacccaaaaggcaccccaggagccacaggaaaagacagccacaccaaccaaccgggcgcacccgagcgccacggagcaggaaaaggagagggcacacaggcgcagaccccaaaagcccagaaaaacaacgccaaacaaccaaccggcgagcaaaggggcagagggcgaagccacaagagaaaccaaacccaagcgcccgcaccccggggagcgagcagaggccaccacacgccaggggggaggacaggaaggacgacagaaaccccacgaacggaccccagaagacgaaaagagaccaggccaccacccccgaacacaaacaaacccgccgcccagaaggagaaaagcccaccaagcacaccaaacacccggggggaaacagagaaagcacgaaccggcaacaacaacagaaacagacaggcggcacaggagggggaaggaaaccgcaggcacagcagaccccccccacagcggccggcaaaggggagaggccgcggccggacacgaggagcccgacaaagagcgggcgcacggaagcacaagagaagcgcgggcagcccccgccccaccgcgcaaaggccacgccggcagccgcccaacgacgcaaagcacccccgacccggaccggacccagaccggacccggacccggaccgcacaccacaacaacgaggaggaacaacgcccaggacccagggaagaggccacaaacagggcgagggcccgcggaccacccaagaagccaagagacaccgcgaacccccgcccacacgcggggcacagcggagccggagaccgagggcccccaagaccaggggaaagaaccacgcagcaagcgagagaggaccccaggacagaggcaggacaccgaccggcagcaagcgcaagcgaagaggagagggaagggagaaaaggggaggccccccggccccaaaagcaacgagcaagcaacccaacacagggacagccaagaggaccagagaggcccaccggacccaacccccccaaaccggacccacgccgaaaagcccacagaaagacagaccaacgacccaaccaaaacagcaagaaggcaccaaaaacacacagcgaacacaggccgggaagggcacacaacacaaacgcacaccaagggccggccaccccgcgccacgaagacaagagccacacagcaggacgcagcgaacaggagaaaaagggaggagagaaaggggggggggggggggccggaggacagagagaaggccagagcaaccggggcccagggcacacagggagcggggggggggaaaggacgaggcaccgcaaaaaagcccaaggcgacgggcacgccggcccccacgaagaggcaggaccagaaccagagcacaacggcagcgacagcaccgccccgaacgcccgccccacgccagaacaagcagccaccagagccagcaacggccagaacaaaccggcccacacgaacaaagcacaccaaaagcacccccgccgacaaaacacacacagccgcggcacacgcgcacaggccaggcacaacacgggaaacagcacccggcacgggacaacacagccaccagggaccggggagaaccaggacgggggcaggcagcaaccaacaagcccgccaaccacgcgcgggggagccaaaaacaccaaggaagacaagaggacgaaaacgcaggcgcagggcgggggccccggcgacaggaaggaggggaaggcagacccgagcaagaccagccggcacagagcaaccaggacagccaggagacacagagaaaccacaggggggggccagacagggccgagcccggcgccggaaccaccgagaccaggcagcccaaaccagaaacgccgccgcccccaaggcggaaaaggcgggccggcaaaaacccacgaaacaacaacaacaacaacaacaacaacaacaacaacgacaaaaaacaaacaagccaacaacaacaaaaacccccaacacagcccaaagcaagggcccaccgcccccgacacggggggcagcaggcccacaggcgacccccccagcccaaagcaaaaccacaggggggacccagcagccccgacgaaacagaagcccaagcgagagaagcaggagcaaaaaaaccccagagagcacagcaccccacacacagcacaccaccaagccgacaggccaaacagcgcggagaaaccgccccaagagagagccgggggcaagaaacaggccgcccagcccagcaggcggacccgaccagaaggggcagccaggaggcgagcaggcgggaaggggagcgaagagggagagagccagaggaaggcagagagagggagagagagagaagagaggccggccaggccacaggagagagaggggaagggaacacagagaggggggagcaagagggcaagagacagaggcaagagaagagagggaggagggggcaagcagcccaaaggagccaggccacccggcagccaggaacgggggaggagcggacagccacgaccagacccgaaggccacagaaaggagcgaggcccagcagaagccgggcggagggggaggggggcggcaaggccccacccgcaggaacaccgcgaggccagccaaccaaaaacaggcacgggcccacaggggcaggaacaccccagagccagccggaaccacacgcacgaggaggagacacacaccaccccccccgcccgcccgcgccagcccaccccgccgcaaggccgggcagacgcaccccccacggggaagcaggggcgcccacaacacacagcaccaccaccggaaacaaggaccgcccgcacacgggaaagggggacaggcagaaccgcacccacagccacggacccaagacaaaaaaaaacagaaggaaacaacggggggaaaacacaaacgcaaacgacgagacccacggccagagacagagagagccgaaacaaaaacaagaacacagaaagaggccaacgaacacccgggaaaagaagggagggagacaaccagggaacagaaccccagccgaaggagccaccgggggcgacaaagcgccccagagaacaccagagaagccgacaacagcggaaagacagagccccccaggaaggagagcaaggcggcccccaccgaaggcacagcggagcaaacgccgcccacagcagccggacccaggaagacccggaacgcccaccccgccccaagggccagccccggcaaccaccaacacggcaaggacccgaagaaagaggacaaaccaaccaaaagcaaagacacaaaacgagagagcggagaaacgccgagcagacgggacgcggccgagaagaccgggccgggaccaggagagccccgcacgacccagccaggggacgagccccccggacaggcacgggagcaaagacacacaaacagaggaaaaccagcagacacaaaaaaaaaaaaaaaacgaagaaaaacgcagagaggcgcaagagaagaagacagacgggcagaagggcaaagccacacaggagggcgaggcccacccaacacgccagggcacagaagaacaaaagcgccaccgagaaagcacaaaaaaaagaacaagaacccccccaacaaagaagccaccaaaacacaacacaagcaaaagaaaaaagaagggcccacagcaaaacaaccaccagcccccggccacgagaggcagaaaaaagaaacaaacaaaaaaaagaacgacgcccgaaagccccgagagaccaccagaccccaggaaaaggcccagacaaaggagcacccaaccaaaacgaccagagaagaacaagacaacaacaaaacacacacacacacacacacacacacacacacacacacacacacgcagagaaacccccacaaaaccgagccaaacccccacaaacaaagaagaccagaaagaaacggcccggacagccaaaaagcaagcagagaagaccaccaacacgccaaaagaggggaacgggcagccagcagagaacagggaggaccgacggccccgggcaagcccgccccagcccaaaccagccaaaacaaaacacaagaaaaaaagcgagcagacagagaggcgaaaagggaagcagcgagggcccccaaaaaaacaggcagcgaaacaacaagaagcgagcggccccgagaagaaggaggacaaaagcggagggaaaagaaaaaggagaggcaacgacaaccagcgcaccgagcgggggcccgggacagaaccggggggagcaggaggccacagccgaccccggacgggagacaggcacccacaccccgcgagcgaacaacaaaacaggacgaagaaaaaacaaaaacaaacagccaaacccacaaagagggcggggaaaccaggaagaagacaaaacaccgaaacgcgacaaacaccaccaacagcgaaacgggcccaaccaggccgaaaggagcgaaaaggcccggcccaaaggacacaccgacgaaacagaccagcgaaggcgacagacaaagaccccagacaaaggcacaaacaacaaagcgagccgagcaaaaagccacaaagccaggccgcgcccaggcacggccgcaacgaaaaaaaacgaaaagacccagccgaagaggagcgcccgcgaaacaaaagcagggggaaagagacgcacgacagccgaagaaccaagccagcccaccggaaaggcaggaaacgaaaggggcagggcaagaccaccgccccccgagacggcagacagccaacacaccgacacagacaaagagagcaagcacagcaaaggaacacacaaaaaccccaccccccacggacagccgcccagagcaggcacccacagaaaggggacaaaagacccaggcaccaccaccccccccccccccccaggacaaggcagagacacggcgggaggaccggccgaaaccgaggccgacaagcgcaacagaacgacacgacgaaccaaccaccaccaagaaggagaagaagggacacccaaaggcgaacggaaaacgacacacgaacgggccacgggagcagaacgaaagcagaaaaggaaaaaggcccgagaagccagaaaagcacacgacggaccacccgaagcacaggacaggacaacacaaccacggcagacggcaggacagagaccccagaccaaaggaaaagcaagacagcaaaccggaacggggcagcccaacaacagagaaaggacaaagacccaaaaagaaaaagacccgccagagaacaagagagggcgggagcggcgcgggcccaaaagaagagcacgaagagccccaaggcaaacaggaagccccccccagcaaaaagccgaaaacaacagggaagaggcgcccccccacacaagacaggagagaaccccagagggagccgaccgagagagaacagacacgaaaacgagagaacaggacagcggcggaacagcgagcacagcggcgagccaaagcgaaagagccaaaaagcacgaacaaggcagaagaaaggagagaggacgcagaaaagcagggacacaaggagggaagggaggcagaaccgccggagacagaacaggcccaaggcgcgaaggcgccccagaacacagagaaggggcccacaacggcccacgcggagcagccccccccccccaaccacagcagagggcaagggcacaaaggcgcagcgagggcgccgccagcaaccgggcagggaccccgcgagaggaccagccgcccgcggaagcagcacgagaaaggacgcccgcaggcgcagaagagccacacaaagggacaagggggaagaaagaagaaggagagagacgcccggcgacaacccagcccagccggagacagcagagaacaaagagggcagacaagggggcaccaaaaccacggagccaccacggagaccagcacccgcggggccgcgaaccgccacagacaggacccagagcaacagaccccaccccagggcccccaagcacaccaacccaaggacccagggcacgccggaaaaggcgagggaaacccaagagggcaaaggccagccaccacccggccggcacacccccaaggaaagcagggccagcccaaacgcagagaagccccaaacacggacagcacaagaaccaaagggaaagaaggaagaaaagagagaggagagggagacccagaagagggaggaaggagagacaagagaagccgaaacaaggggggcaggcggcacaaaggaaccccgcaagacagaggcacagcgccacagcggagacgaaagacaaccggccaaacagaggcaaaggcggagacccaaacccggccaccacccacagcccaccccagcccagccgggagaggaacagcaaaaacgcgaagcagaaagggaaaggaaagagcacgaacaacggacaagagcaagcacacagggggacccggaagaccacacagggagcggccagggccccgcaagcgagaaccagaaacacagaaacaggccaggccagaccgccgacaaacagagcgaacgagccaaaacggaacaagcaaagggcagcaaccgaccaaaggagaccaccagccaccccagcgccccccccccccccaccccccaccgggccccacaagaggcggaagaggaggcccgacacacgcaggaaagcccccgagcaaaagcacagcaggcaaaaacaagagccgacaaggccacaagccaacaacccagcgcgcgcacgccgccacagacagaaccgcagccaggcgccccaaaccagaaaccccgccccgccacccccaccccgcccccgaggcgggaagagcaaggcacccagcccgcccagcgacacagggaaaaaccaagaaaaaaggaagaagccacgacaaaacgaacacacgcaaacacaaaacaaagaacccagcagaaagagagccacagacaaggcacgggagggagcaggaggagcgagaaggacccggccccccagacaccccaagagcccgaagcaaacggaaagagccaacggaaccaccggcaaaagaagcaccaccccagacggcccgcccagaagggaggcggaccggggagcagcaccagacccaagggcaagccgagggaggcagcaaggaagaggaacacccaaacccgaaccccaggagaaaagagcagcccgccaagaagagaggcaaacagacaccgcacaccaggagggcccaaagcaggacacaaaaggcacccacgcccagaggcaaggggacaaacggaggaagccacggagaagagcgaaaaaaaaaaaagcaaaaaaaggcccagaacaaaaagaaggggagcaaagaacgagaaaagaaaaacaggagaaaaaaagagggagaggaaagaaaaaagaagacacggggccagacacccccccgaccccacgacggccccgcaggcaagagaaaagagaaacaacaacaagaaggcacacacagccccgcacgagacaacacaccacgagaaaccaaccaacacacaaagacccaaaaaaaacgccaggggaacaaacaccccagcaaaccaggacccaacaggagggggcagaacaagaaggcccaaaagagagcgacgcaccagggggcccagcagcggaaccacgcgacacggcacaacgagagccagcagaacccacggaaaaaaagaaaaccaacaaaaagcagcccgaaggcgcagaagacaggagcaggacaacccccacgagccacaggcaaccaccaacagccccacgagaccccccaggcgaccacagagcaggcgacaaaacacaggacccgaagcacagccccaggaccccacgacaccgcgcccccaccgccagcccgcacgaaaggccacaaggcggaagggaaccaaacaggaaaacaagacagacacaccaaagaaaggggggcccaagacaggcacaagagcccgaacccacacaccaggagaccccaaacccacggggcgcggggaagccagcacagcaccccaaggcgaaacacagagcaggaccaaagaggacaacacaaagacgcaagggcaaggacgagaagggggaaaaggccgcagaaacccccagagacaccccccccccaaagcaaccaaaaccaacaacaaaccacacagccaggcaagaacaacacccgaagaccaaaagaggaccagaaacgacgacccaagcagagaacaccccagcaacaacaacccgaacacagaaaagcaaaacaagacccaccaggaacaaagcaagagccaaagagcacaacaaggccacaaaaaggaaaaagaagcaggcaaaaccaacagacaaaaaagcaaaccgacacaccacagacagaaggcaagaacaggacaaacaaaagaagaaaaaagaagaaaagagcagaaagaggaaaaagaaggaaaccagaaagcaaaaaagaacgaacaacgaagagaacagcaagaaaacaagacaacagaacagcccaacgcaaaagagaaaagcggaacacaaccagccgggagggagaggagcccaaccaagagggagaggggagcgaaggacagcacgcccagaaacaccacggaaacaccgagacagacagagagaacaacaacaaacaaaaaccaaaaccaaccggcacggaagcaacaccgaaaaaccaaggaacagagggaacaacaaccaggcaacccccaaaggagagagaggaaaaggaaagaggagagcaacagacaccccagacagggaaacacaccaaaccgagaaccacagaaaacacaggcacgcaacccacaaaaagacacaaggagacccggccgaaagaggcaacaaaagcaaagaagggagaccagaccaggcaaaagccagcgcccagaagacagccacacgcagccaaaccagggaccaccacagaaagaccaccgcagaagaaaaggcgagaaaagaaaaaaaaagccaccaggggggcaggcagaagacaaaggaaaagaaagaacagaaagcaggcacggaaggaacaaaagaaacaaggaaaagggggaccccccggacaggggggggggggggggcgggaacaggccaaaggaaaaaaagcacgagggagaaagccaagcacccaggagaaccgcagccaaaaggcgcagcaagagagcacggacaaagggcaggcgaagcagaacaccgaggagaggcccacaccacaggagagacaagcggcaggagcccaggcggaaaggcagggcgaggagaaaccagacgggaaagacagcgccaaacgccaagacacaaaacccaagacacgcgccacagggaggggggaagcagacaaaacggcaaaggcgagaaaagcagggaggcagaccaaagggagcccacaccccccagaacaagggacacaggaggaaggccagaaaaagccaagagacagaagagggaacagggcagcagcaaacaagccgaggacaaacagccacacacgaggggcacacgaggccgcacagacggccacaacaacacaggagaagaggggcccagaggcccacccacccgagggagagcaagaggcaaggagagagagccgagaaaagagcgccgaaaaacaaccagcagccgacaaaggacgaagaaaccaagggcacacacacgcaaagaagacagaagaggaaaagccggaagaagggacggcagggcaacgacacagcggagacacagagaaaggagccaggaggaaagccccagagacgggccggccagcagaccacaaccgggcagccggaaaggcaggaaaccggaagagaagaggggcaggggcgagagaaaagaagagccaagacaagaccgacaaggccaaaaggcgacacagagaaggaagggggaggggacccgaccccgccgaaaaccggccagagaaagggcacgggggcccgcaggccagcaggggcgggcagaacgaagagcaggaagcccaccccgagcaagcaggcaggcaggggaggggagacacaccccccaaacaaaaaaaaaaagaaaaagcggccgaggggggaaaaaacagccaaagcgccggaacagggcaaagaaaaaacgcagggaccaacaggaaacgaaaggcaagacgcccacaggaacaacaacgaaaagccggagcgaggccgacaaagcaaagacggaggaaccaggaaaagagggcgggaaccggcaaggacgaacaaagagaaaacacaaaaacacaaggaacccgcggagaagggggaaacagggagaaggaggaccggccgagacaaggccaaggcaggggggaggcaggaagggcgccccaaagacgcccaaccccagccccacggggcgccaagggccggccagcagaccacaaccgggcagccggaaaggcaggaaaccggaagagaagaggggcaggggcaagagaaaagaagagccaagacagaccgacaaggccaaaaggcgacacagagaaggaagggggaggggacccgacccgccgaaaaccggccagagaaagggcacgggggcccgcaggccagcaggggcaggcagaacaaagagcaggaagcccaccccgagcaagcaggcaggcaggggaggggagacacagagaccaacgaaggcaccaaaggacaagggaggaggcccagaggggaaccaccgggcggagcgggcaaaaagagcaggcgagcaaaccagggggaagcaagccagaaggaacacccccaagcccgcacagcccgcccgacgggagcagccggccgggagaacagcaagagaacaaagcgcaagaccccacccaagccggcaaggccaggaaaaaaacccgacaagacagaaggccgggagannnnnnnnnnnnnnnnnnnnnnnnnnnnnnnnnnnnnnnnnnnnnnnnnnnnnnnnnnnnnnnnnnnnnnnnnnnnnnnnnnnnnnnnnnnnnnnnnnnnnnnnnnnnnnnnnnnnnnnnnnnnnnnnnnnnnnnnnnnnnnnnnnnnnnnnnnnnnnnnnnnnnnnnnnnnnnnnnnnnnnnnnnnnnnnnnnnnnnnnnnnnnnnnnnnnnnnnnnnnnnnnnnnnnnnnnnnnnnnnnnnnnnnnnnnnnnnnnnnnnnnnnnnnnnnnnnnnnnnnnnnnnnnnnnnnnnnnnnnnnnnnnnnnnnnnnnnnnnnnnnnnnnnnnnnnnnnnnnnnnnnnnnnnnnnnnnnnnnnnnnnnnnnnnnnnnnnnnnnnnnnnnnnnnnnnnnnnnnnnnnnnnnnnnnnnnnnnnnnnnnnnnnnnnnnnnnnnnnnnnnnnnnnnnnnnnnnnnnnnnnnnnnnnnnnnnnnnnnnnnnnnnnnnnnnnnnnnnnnnnnnnnnnnnnnnnnnnnnnnnnnnnnnnnnnnnnnnnnnnnnnnnnnnnnnnnnnnnnnnnnnnnnnnnnnnnnnnnnnnnnnnnnnnnnnnnnnnnnnnnnnnnnnnnnnnnnnnnnnnnnnnnnnnnnnnnnnnnnnnnnnnnnnnnnnnnnnnnnnnnnnnnnnnnnnnnnnnnnnnnnnnnnnnnnnnnnnnnnnnnnnnnnnnnnnnnnnnnnnnnnnnnnnnnnnnnnnnnnnnnnnnnnnnnnnnnnnnnnnnnnnnnnnnnnnnnnnnnnnnnnnnnnnnnnnnnnnnnnnnnnnnnnnnnnnnnnnnnnnnnnnnnnnnnnnnnnnnnnnnnnnnnnnnnnnnnnnnnnnnnnnnnnnnnnnnnnnnnnnnnnnnnnnnnnnnnnnnnnnnnnnnnnnnnnnnnnnnnnnnnnnnnnnnnnnnnnnnnnnnnnnnnnnnnnnnnnnnnnnnnnnnnnnnnnnnnnnnnnnnnnnnnnnnnnnnnnnnnnnnnnnnnnnnnnnnnnnnnnnnnnnnnnnnnnnnnnnnnnnnnnnnnnnnnnnnnnnnnnnnnnnnnnnnnnnnnnnnnnnnnnnnnnnnnnnnnnnnnnnnnnnnnnnnnnnnnnnnnnnnnnnnnnnnnnnnnnnnnnnnnnnnnnnnnnnnnnnnnnnnnnnnnnnnnnnnnnnnnnnnnnnnnnnnnnnnnnnnnnnnnnnnnnnnnnnnnnnnnnnnnnnnnnnnnnnnnnnnnnnnnnnnnnnnnnnnnnnnnnnnnnnnnnnnnnnnnnnnnnnnnnnnnnnnnnnnnnnnnnnnnnnnnnnnnnnnnnnnnnnnnnnnnnnnnnnnnnnnnnnnnnnnnnnnnnnnnnnnnnnnnnnnnnnnnnnnnnnnnnnnnnnnnnnnnnnnnnnnnnnnnnnnnnnnnnnnnnnnnnnnnnnnnnnnnnnnnnnnnnnnnnnnnnnnnnnnnnnnnnnnnnnnnnnnnnnnnnnnnnnnnnnnnnnnnnnnnnnnnnnnnnnnnnnnnnnnnnnnnnnnnnnnnnnnnnnnnnnnnnnnnnnnnnnnnnnnnnnnnnnnnnnnnnnnnnnnnnnnnnnnnnnnnnnnnnnnnnnnnnnnnnnnnnnnnnnnnnnnnnnnnnnnnnnnnnnnnnnnnnnnnnnnnnnnnnnnnnnnnnnnnnnnnnnnnnnnnnnnnnnnnnnnnnnnnnnnnnnnnnnnnnnnnnnnnnnnnnnnnnnnnnnnnnnnnnnnnnnnnnnnnnnnnnnnnnnnnnnnnnnnnnnnnnnnnnnnnnnnnnnnnnnnnnnnnnnnnnnnnnnnnnnnnnnnnnnnnnnnnnnnnnnnnnnnnnnnnnnnnnnnnnnnnnnnnnnnnnnnnnnnnnnnnnnnnnnnnnnnnnnnnnnnnnnnnnnnnnnnnnnnnnnnnnnnnnnnnnnnnnnnnnnnnnnnnnnnnnnnnnnnnnnnnnnnnnnnnnnnnnnnnnnnnnnnnnnnnnnnnnnnnnnnnnnnnnnnnnnnnnnnnnnnnnnnnnnnnnnnnnnnnnnnnnnnnnnnnnnnnnnnnnnnnnnnnnnnnnnnnnnnnnnnnnnnnnnnnnnnnnnnnnnnnnnnnnnnnnnnnnnnnnnnnnnnnnnnnnnnnnnnnnnnnnnnnnnnnnnnnnnnnnnnnnnnnnnnnnnnnnnnnnnnnnnnnnnnnnnnnnnnnnnnnnnnnnnnnnnnnnnnnnnnnnnnnnnnnnnnnnnnnnnnnnnnnnnnnnnnnnnnnnnnnnnnnnnnnnnnnnnnnnnnnnnnnnnnnnnnnnnnnnnnnnnnnnnnnnnnnnnnnnnnnnnnnnnnnnnnnnnnnnnnnnnnnnnnnnnnnnnnnnnnnnnnnnnnnnnnnnnnnnnnnnnnnnnnnnnnnnnnnnnnnnnnnnnnnnnnnnnnnnnnnnnnnnnnnnnnnnnnnnnnnnnnnnnnnnnnnnnnnnnnnnnnnnnnnnnnnnnnnnnnnnnnnnnnnnnnnnnnnnnnnnnnnnnnnnnnnnnnnnnnnnnnnnnnnnnnnnnnnnnnnnnnnnnnnnnnnnnnnnnnnnnnnnnnnnnnnnnnnnnnnnnnnnnnnnnnnnnnnnnnnnnnnnnnnnnnnnnnnnnnnnnnnnnnnnnnnnnnnnnnnnnnnnnnnnnnnnnnnnnnnnnnnnnnnnnnnnnnnnnnnnnnnnnnnnnnnnnnnnnnnnnnnnnnnnnnnnnnnnnnnnnnnnnnnnnnnnnnnnnnnnnnnnnnnnnnnnnnnnnnnnnnnnnnnnnnnnnnnnnnnnnnnnnnnnnnnnnnnnnnnnnnnnnnnnnnnnnnnnnnnnnnnnnnnnnnnnnnnnnnnnnnnnnnnnnnnnnnnnnnnnnnnnnnnnnnnnnnnnnnnnnnnnnnnnnnnnnnnnnnnnnnnnnnnnnnnnnnnnnnnnnnnnnnnnnnnnnnnnnnnnnnnnnnnnnnnnnnnnnnnnnnnnnnnnnnnnnnnnnnnnnnnnnnnnnnnnnnnnnnnnnnnnnnnnnnnnnnnnnnnnnnnnnnnnnnnnnnnnnnnnnnnnnnnnnnnnnnnnnnnnnnnnnnnnnnnnnnnnnnnnnnnnnnnnnnnnnnnnnnnnnnnnnnnnnnnnnnnnnnnnnnnnnnnnnnnnnnnnnnnnnnnnnnnnnnnnnnnnnnnnnnnnnnnnnnnnnnnnnnnnnnnnnnnnnnnnnnnnnnnnnnnnnnnnnnnnnnnnnnnnnnnnnnnnnnnnnnnnnnnnnnnnnnnnnnnnnnnnnnnnnnnnnnnnnnnnnnnnnnnnnnnnnnnnnnnnnnnnnnnnnnnnnnnnnnnnnnnnnnnnnnnnnnnnnnnnnnnnnnnnnnnnnnnnnnnnnnnnnnnnnnnnnnnnnnnnnnnnnnnnnnnnnnnnnnnnnnnnnnnnnnnnnnnnnnnnnnnnnnnnnnnnnnnnnnnnnnnnnnnnnnnnnnnnnnnnnnnnnnnnnnnnnnnnnnnnnnnnnnnnnnnnnnnnnnnnnnnnnnnnnnnnnnnnnnnnnnnnnnnnnnnnnnnnnnnnnnnnnnnnnnnnnnnnnnnnnnnnnnnnnnnnnnnnnnnnnnnnnnnnnnnnnnnnnnnnnnnnnnnnnnnnnnnnnnnnnnnnnnnnnnnnnnnnnnnnnnnnnnnnnnnnnnnnnnnnnnnnnnnnnnnnnnnnnnnnnnnnnnnnnnnnnnnnnnnnnnnnnnnnnnnnnnnnnnnnnnnnnnnnnnnnnnnnnnnnnnnnnnnnnnnnnnnnnnnnnnnnnnnnnnnnnnnnnnnnnnnnnnnnnnnnnnnnnnnnnnnnnnnnnnnnnnnnnnnnnnnnnnnnnnnnnnnnnnnnnnnnnnnnnnnnnnnnnnnnnnnnnnnnnnnnnnnnnnnnnnnnnnnnnnnnnnnnnnnnnnnnnnnnnnnnnnnnnnnnnnnnnnnnnnnnnnnnnnnnnnnnnnnnnnnnnnnnnnnnnnnnnnnnnnnnnnnnnnnnnnnnnnnnnnnnnnnnnnnnnnnnnnnnnnnnnnnnnnnnnnnnnnnnnnnnnnnnnnnnnnnnnnnnnnnnnnnnnnnnnnnnnnnnnnnnnnnnnnnnnnnnnnnnnnnnnnnnnnnnnnnnnnnnnnnnnnnnnnnnnnnnnnnnnnnnnnnnnnnnnnnnnnnnnnnnnnnnnnnnnnnnnnnnnnnnnnnnnnnnnnnnnnnnnnnnnnnnnnnnnnnnnnnnnnnnnnnnnnnnnnnnnnnnnnnnnnnnnnnnnnnnnnnnnnnnnnnnnnnnnnnnnnnnnnnnnnnnnnnnnnnnnnnnnnnnnnnnnnnnnnnnnnnnnnnnnnnnnnnnnnnnnnnnnnnnnnnnnnnnnnnnnnnnnnnnnnnnnnnnnnnnnnnnnnnnnnnnnnnnnnnnnnnnnnnnnnnnnnnnnnnnnnnnnnnnnnnnnnnnnnnnnnnnnnnnnnnnnnnnnnnnnnnnnnnnnnnnnnnnnnnnnnnnnnnnnnnnnnnnnnnnnnnnnnnnnnnnnnnnnnnnnnnnnnnnnnnnnnnnnnnnnnnnnnnnnnnnnnnnnnnnnnnnnnnnnnnnnnnnnnnnnnnnnnnnnnnnnnnnnnnnnnnnnnnnnnnnnnnnnnnnnnnnnnnnnnnnnnnnnnnnnnnnnnnnnnnnnnnnnnnnnnnnnnnnnnnnnnnnnnnnnnnnnnnnnnnnnnnnnnnnnnnnnnnnnnnnnnnnnnnnnnnnnnnnnnnnnnnnnnnnnnnnnnnnnnnnnnnnnnnnnnnnnnnnnnnnnnnnnnnnnnnnnnnnnnnnnnnnnnnnnnnnnnnnnnnnnnnnnnnnnnnnnnnnnnnnnnnnnnnnnnnnnnnnnnnnnnnnnnnnnnnnnnnnnnnnnnnnnnnnnnnnnnnnnnnnnnnnnnnnnnnnnnnnnnnnnnnnnnnnnnnnnnnnnnnnnnnnnnnnnnnnnnnnnnnnnnnnnnnnnnnnnnnnnnnnnnnnnnnnnnnnnnnnnnnnnnnnnnnnnnnnnnnnnnnnnnnnnnnnnnnnnnnnnnnnnnnnnnnnnnnnnnnnnnnnnnnnnnnnnnnnnnnnnnnnnnnnnnnnnnnnnnnnnnnnnnnnnnnnnnnnnnnnnnnnnnnnnnnnnnnnnnnnnnnnnnnnnnnnnnnnnnnnnnnnnnnnnnnnnnnnnnnnnnnnnnnnnnnnnnnnnnnnnnnnnnnnnnnnnnnnnnnnnnnnnnnnnnnnnnnnnnnnnnnnnnnnnnnnnnnnnnnnnnnnnnnnnnnnnnnnnnnnnnnnnnnnnnnnnnnnnnnnnnnnnnnnnnnnnnnnnnnnnnnnnnnnnnnnnnnnnnnnnnnnnnnnnnnnnnnnnnnnnnnnnnnnnnnnnnnnnnnnnnnnnnnnnnnnnnnnnnnnnnnnnnnnnnnnnnnnnnnnnnnnnnnnnnnnnnnnnnnnnnnnnnnnnnnnnnnnnnnnnnnnnnnnnnnnnnnnnnnnnnnnnnnnnnnnnnnnnnnnnnnnnnnnnnnnnnnnnnnnnnnnnnnnnnnnnnnnnnnnnnnnnnnnnnnnnnnnnnnnnnnnnnnnnnnnnnnnnnnnnnnnnnnnnnnnnnnnnnnnnnnnnnnnnnnnnnnnnnnnnnnnnnnnnnnnnnnnnnnnnnnnnnnnnnnnnnnnnnnnnnnnnnnnnnnnnnnnnnnnnnnnnnnnnnnnnnnnnnnnnnnnnnnnnnnnnnnnnnnnnnnnnnnnnnnnnnnnnnnnnnnnnnnnnnnnnnnnnnnnnnnnnnnnnnnnnnnnnnnnnnnnnnnnnnnnnnnnnnnnnnnnnnnnnnnnnnnnnnnnnnnnnnnnnnnnnnnnnnnnnnnnnnnnnnnnnnnnnnnnnnnnnnnnnnnnnnnnnnnnnnnnnnnnnnnnnnnnnnnnnnnnnnnnnnnnnnnnnnnnnnnnnnnnnnnnnnnnnnnnnnnnnnnnnnnnnnnnnnnnnnnnnnnnnnnnnnnnnnnnnnnnnnnnnnnnnnnnnnnnnnnnnnnnnnnnnnnnnnnnnnnnnnnnnnnnnnnnnnnnnnnnnnnnnnnnnnnnnnnnnnnnnnnnnnnnnnnnnnnnnnnnnnnnnnnnnnnnnnnnnnnnnnnnnnnnnnnnnnnnnnnnnnnnnnnnnnnnnnnnnnnnnnnnnnnnnnnnnnnnnnnnnnnnnnnnnnnnnnnnnnnnnnnnnnnnnnnnnnnnnnnnnnnnnnnnnnnnnnnnnnnnnnnnnnnnnnnnnnnnnnnnnnnnnnnnnnnnnnnnnnnnnnnnnnnnnnnnnnnnnnnnnnnnnnnnnnnnnnnnnnnnnnnnnnnnnnnnnnnnnnnnnnnnnnnnnnnnnnnnnnnnnnnnnnnnnnnnnnnnnnnnnnnnnnnnnnnnnnnnnnnnnnnnnnnnnnnnnnnnnnnnnnnnnnnnnnnnnnnnnnnnnnnnnnnnnnnnnnnnnnnnnnnnnnnnnnnnnnnnnnnnnnnnnnnnnnnnnnnnnnnnnnnnnnnnnnnnnnnnnnnnnnnnnnnnnnnnnnnnnnnnnnnnnnnnnnnnnnnnnnnnnnnnnnnnnnnnnnnnnnnnnnnnnnnnnnnnnnnnnnnnnnnnnnnnnnnnnnnnnnnnnnnnnnnnnnnnnnnnnnnnnnnnnnnnnnnnnnnnnnnnnnnnnnnnnnnnnnnnnnnnnnnnnnnnnnnnnnnnnnnnnnnnnnnnnnnnnnnnnnnnnnnnnnnnnnnnnnnnnnnnnnnnnnnnnnnnnnnnnnnnnnnnnnnnnnnnnnnnnnnnnnnnnnnnnnnnnnnnnnnnnnnnnnnnnnnnnnnnnnnnnnnnnnnnnnnnnnnnnnnnnnnnnnnnnnnnnnnnnnnnnnnnnnnnnnnnnnnnnnnnnnnnnnnnnnnnnnnnnnnnnnnnnnnnnnnnnnnnnnnnnnnnnnnnnnnnnnnnnnnnnnnnnnnnnnnnnnnnnnnnnnnnnnnnnnnnnnnnnnnnnnnnnnnnnnnnnnnnnnnnnnnnnnnnnnnnnnnnnnnnnnnnnnnnnnnnnnnnnnnnnnnnnnnnnnnnnnnnnnnnnnnnnnnnnnnnnnnnnnnnnnnnnnnnnnnnnnnnnnnnnnnnnnnnnnnnnnnnnnnnnnnnnnnnnnnnnnnnnnnnnnnnnnnnnnnnnnnnnnnnnnnnnnnnnnnnnnnnnnnnnnnnnnnnnnnnnnnnnnnnnnnnnnnnnnnnnnnnnnnnnnnnnnnnnnnnnnnnnnnnnnnnnnnnnnnnnnnnnnnnnnnnnnnnnnnnnnnnnnnnnnnnnnnnnnnnnnnnnnnnnnnnnnnnnnnnnnnnnnnnnnnnnnnnnnnnnnnnnnnnnnnnnnnnnnnnnnnnnnnnnnnnnnnnnnnnnnnnnnnnnnnnnnnnnnnnnnnnnnnnnnnnnnnnnnnnnnnnnnnnnnnnnnnnnnnnnnnnnnnnnnnnnnnnnnnnnnnnnnnnnnnnnnnnnnnnnnnnnnnnnnnnnnnnnnnnnnnnnnnnnnnnnnnnnnnnnnnnnnnnnnnnnnnnnnnnnnnnnnnnnnnnnnnnnnnnnnnnnnnnnnnnnnnnnnnnnnnnnnnnnnnnnnnnnnnnnnnnnnnnnnnnnnnnnnnnnnnnnnnnnnnnnnnnnnnnnnnnnnnnnnnnnnnnnnnnnnnnnnnnnnnnnnnnnnnnnnnnnnnnnnnnnnnnnnnnnnnnnnnnnnnnnnnnnnnnnnnnnnnnnnnnnnnnnnnnnnnnnnnnnnnnnnnnnnnnnnnnnnnnnnnnnnnnnnnnnnnnnnnnnnnnnnnnnnnnnnnnnnnnnnnnnnnnnnnnnnnnnnnnnnnnnnnnnnnnnnnnnnnnnnnnnnnnnnnnnnnnnnnnnnnnnnnnnnnnnnnnnnnnnnnnnnnnnnnnnnnnnnnnnnnnnnnnnnnnnnnnnnnnnnnnnnnnnnnnnnnnnnnnnnnnnnnnnnnnnnnnnnnnnnnnnnnnnnnnnnnnnnnnnnnnnnnnnnnnnnnnnnnnnnnnnnnnnnnnnnnnnnnnnnnnnnnnnnnnnnnnnnnnnnnnnnnnnnnnnnnnnnnnnnnnnnnnnnnnnnnnnnnnnnnnnnnnnnnnnnnnnnnnnnnnnnnnnnnnnnnnnnnnnnnnnnnnnnnnnnnnnnnnnnnnnnnnnnnnnnnnnnnnnnnnnnnnnnnnnnnnnnnnnnnnnnnnnnnnnnnnnnnnnnnnnnnnnnnnnnnnnnnnnnnnnnnnnnnnnnnnnnnnnnnnnnnnnnnnnnnnnnnnnnnnnnnnnnnnnnnnnnnnnnnnnnnnnnnnnnnnnnnnnnnnnnnnnnnnnnnnnnnnnnnnnnnnnnnnnnnnnnnnnnnnnnnnnnnnnnnnnnnnnnnnnnnnnnnnnnnnnnnnnnnnnnnnnnnnnnnnnnnnnnnnnnnnnnnnnnnnnnnnnnnnnnnnnnnnnnnnnnnnnnnnnnnnnnnnnnnnnnnnnnnnnnnnnnnnnnnnnnnnnnnnnnnnnnnnnnnnnnnnnnnnnnnnnnnnnnnnnnnnnnnnnnnnnnnnnnnnnnnnnnnnnnnnnnnnnnnnnnnnnnnnnnnnnnnnnnnnnnnnnnnnnnnnnnnnnnnnnnnnnnnnnnnnnnnnnnnnnnnnnnnnnnnnnnnnnnnnnnnnnnnnnnnnnnnnnnnnnnnnnnnnnnnnnnnnnnnnnnnnnnnnnnnnnnnnnnnnnnnnnnnnnnnnnnnnnnnnnnnnnnnnnnngcccccaacgaccagcccccacaggcccccccccacccgacccaccccgggccccccaccccaccacaccagcccccccaacagagccaaccccgaggagacaagcaccgggccccgacagccgggcggagagagcagaaccgaccaggaaggaagcccaaaggagacaaccagggccgggcagggaccaccagagaaaaaaaaggcgagacagggccggagccccgacgccggaacacgagaccaggcggcccgaaccagaaaccgccgccgcccccgaggcgcgaaaaggcggcaccaccagcccagccagagaaagccaccagcgcaaacagcgcaaaacgagagaccaggaaagaccagacacgggagggacagggggccagcagcaacaaagaagcaggacaagcgagcaaggccgggggggagagcacggaaagcccaggagggagagcgggcgaggagaacaccagcgagaaaccgcacagaccacaggggaacaagggcccccaccagccacggaggagcaccacccacacccgacagcaggcgcacgagcgacaccaccgagggaaagaagaaaccaaaaaaaaagggaaaaagccgcaagaagagcggaaaaaacaaagcaaacgagagagagcccaaaacaaccacgcaagaaaaaaccaaacaagaaacagagaagggaaagcggcaccaaaagacaagaaaaagaaacaaccacagccagaccaccccccccagggcccccgccccacgcccccacccaaccccccaccccgcccaagaggagccacccccaccccaccccaccgggccccccaccccggggcccaagcccaagggaggacaccccccacgagaccagaccggagcggacccgcgaagggggggggcaacagcgggagagccgggagcagccaggcgagagaccgagggccaggcaggaagcgcggcccaggggccaccccccccagccccaggcccccaacacccacaggggcccagccgccaggggggaagagcacgacgcaggcgggccccaaaaggcagccagcaggcccgcgaagcacaacgaacacagaaaggcagggccccaagcccccgcggagcggaccaagggacacacgggaccccacgccaggccccccacagccagacaggaacaaagagcagagcgacggggaggcaaccacaaccccacgagcccgccccacggacggaccacaagcccccccccacgaaaacaccaccaaggccccccgagcgagaacccacccccaggccggacacagagggaccccaccccacgccgagggccgccaaccgcggcacaggaccagcacgccccccaaaccgacagccccccccccccacccccccacccgacccccccccgcacccccccaggacccccccccaaggggagaggcacccacggaccccgcgaaccccgagcccggggagacgggacgacaggcaaacacaaggagacaaccagcggccaggagagccaccaggagaacaggcaccagccgacagagcccaccagccagagaacagaaaagaaccacacgaaccaccacggggacacggggccagcggcacacaaaaaggcacagaaaagggaacaggccccaggccggggggcacgggaagaccaagaggcaaacgggccaggagacaaccaaccgaggaacggcagagaccagagggcgaccaggcaacccaccagcaaggaggagcgccccccacaccacagcaggcggcaccgagggacagccaccgaggaaaggagaaccaggagaagcaccccaaagcacaagacgaacacaaggcccagccagagacccaggaaccgagcaaccccacgaggaggggggggagccgagaaaagggaaaaccccacagaggcaaaggaagacccaacgagggcaggccagaccagccagccacagaagccccagcagaggccccacccccaacggacagccagcccaaggcaaggaacacaccagcacagaaccacaaaaccacgggaaaccaacacagcgaaagagccgggggagagggaggggaagggggccgagaagaccaaagaggccaaagagcagagcaaggaaagagcagggaagaaaggggaaggagaagaagggcagaggcacagaagcaggaacaaacaagggccaagggagcagagccacggacaggggagaaggcggaacccacccagaccagaaaagaaagaggcggcgggaaggagcgagccaggagccgaacgagagcaccacgagaagagagcaaaaacagcaaaggacgcagagacggcaagaagaggcagaagaccaaaaggacacccgaaggacaaaaaaacaggaaaaaaaaaaacaccaaaacaacaaaacacaaaaaaaaggaacacacagccggcgagaggcaccaccgaaggcaccacagagcaggaccaggaggcagaagaaggcacaaccccggacagagcagcaggaagcacaagggagaaggaaccaaacccaggcccgcaagagaagcagcccacccaacgcgagccagaacaccggccgaaaagaacaagcaaaaaaagaggggggaaggacacagagacacccagaagaaaagagcagcaacaggacaccaccaaaggagagagaaagaaggaaaaaccaggaggaaggcaagacagaagcacaacgcggcagagcaaccaaaaagccagggcacggaacgcaccgggaaggaaacaaacagaaaagagaaaagaccgaaaagcaacagaaggaaaagacaacgagaacaagaacagagcaaacaaagacgggaagcaaacagaacaaccgcacccccaggggcaaaaaacaagcaaacggaaacaagagagggagaaggaaaagaacaccacagccagccagaaagccacacccccgacacaggagggcaaaccagagaggaaaaagaacagcaagcaacaaaaaacaagagaaaaaaacacaaacgaaaagaaaaaaaggcaacaggcacacccgagaaagagcaaaaaacgggggggagacaggaccccggacccgcgccgaaaccgcacgagaccaggcgaccccagccacaaacaccacggcccgccccaaggggaaaaagcagcaccacagccagccccaggaaaaaaaaaagagagggaggcaagacagcaaccagacacgagaaggcaggcaggaaagaaggggagcaaggacagccggcacaagaagccaggcagcgggcaaagaaagagcacaaaaaagaagaacagagagcagcgaggcagaggcgagcagccacaacacaaaaaaaaagaagagggcaaaggaagagcgcaaaaacaaacgacccaggaagaaacagaagacagcaaaaaacaaaagaaaggacaaaaggagaaaagcaacacccagaaaccaagaaaacccccagcagacaaagaaacaaaaagaacgaggaagacagaagagagacaccagacaccagcaagcaaagagggcacgacacgggcccggggggggggagggagagagagagagagagagagaacagagcacagaacgcggcaggagaagacaaggccacaaggaccagaacacccccgccagaaaacgacccgacccacaacccgccgccccacacccgcaacccaccagcggcggagcgacgggcagcaccagagggggcagggcccccgcccccccaggaacgcccaggacggcagccgagaaaagagggaggcaacccaacaaggcggggaaaaggaaaaaagacaggaaagagacagggacacaaggagaacaaacagacacagggaaggacagagaaaagggaggaaaaaaaaacgaagaagggcccagagagaacacacaaagcaagaaaaaaagaaaggaaaggaaaggaaaggaaaggaaaggaaaggaaagggaagggaagggaagggaaaggannnnnnnnnnnnnnnnnnnnnnnnnnnnnnnnnnnnnnnnnnnnnnnnnnnnnnnnnnnnnnnnnnnnnnnnnnnnnnnnnnnnnnnnnnnnnnnnnnnngaaggaaaggaaaaaaccaagcgcaacacgaaacaaaccaaaccacaagcacaacgaaagaaagaagaacaaacagacacagggaaggacagagaaaagggaggaaaaaaaaaaaaggaagacagaagccgcaagacagaagacgaaagacgacagacagcacgacgagacccccggggggacccaacaaacaggccccagaggcccaagcgggaagccccacccccagaccggagaacacggaaacagagaaggcgggaggggccaggcacagcagcggaacagcccacccagaagaaagggaacaaaccaaggcgggaagcacaacccacagaaacaagccaccacgaacagccccaaccccacaaaaagcacaccgagcacacgggccccagacagccccggagcccaggcaccaaccacaggccccgcaggcccgagacagcaccagcaaccggcaaacacaccaccaccaggaggaaaacggcggagccgggcagcccacccccaaccccccagcgcaaagcgagcagcaagcaccacagcgcggaacacacaggggaaccacccaaccacaaacgagcaacaaaagagagaggggggaaaagcaaagacaaaaagcagaggggcaacaaaaaacaagaaacgacaagaaacccagggccaccacgggcacaacaaacggacaaagagagacaggaggcccggaaacgggagacaaccaaaggaaagggaagagcaggcccaacgcaaaaaaggacgagcaaacaaaggaccagaaaaagggacaacaaaggcaaggagcaacccaaaggccagacaaaacaaaagcgacaggagccacccaggaggggcaggagcccgagagcagccgggcgggcacacacaaggaagaagacccccaccacacagagacgagaaggggcgagccagccgggaggagaaagaagaggcaagaaaggagggaagaaggagagggaacaccacagggaccccgaagggaagagggaggcacaaggaaggcagggggcaaaaggcaccaccagagaaggcaagaaacccccacagaaaccaccacggagggaagcaagcgggagcagaacacagcaaacggagaacaaccaaacagagaagacaaagcaagaagccaagagccggaaacaaaaaaaaagggaaaagagcgggagaccacacggggaggcaggaggcagccagagaggacaaggaaagaaaaccgccgaaaacaggccccacccacaggcggcggacaaagcaaagggaaaagaagcaaagccaccccaaccccaaacgggaggaaagagccccgcgccgcgccgcccccagcccgaccgggcgcccgcccgccccacaaaccagaaaacccccaggccgccaagcagcacagccacagaacagcagagcggaaaggcccgcgaggaacccagcgagcaaggccaggagacccccaggaacacggaggcccaagcccccacccaacgacacccacccgcaagggcgaaccgccaaaagcacaaacagggagaagagcagagagcgagcgcaggcaacgggaaggccacagagaaggcggacagaacacagaaaggcgacggaagaagcaggaggaagcaggcaaaacccagaaacaggcacaaacaccccacccagaaagacaaccccacaaaaggcaacccccccaaaaccacagcccagaaagccaccgcaaagggacacagcccgaaggggaaccgacagcaggcagacgaggaaaagaaccccaaacggcacaccagaccaaccccaaccccccacgggcaccacccaagggaggggagagcagacacacaggaacaaagccaaggggaggcagaccgcgaaggaccacacaagcggcccacaaagaagaacgagggcgggaccagcagcaccaacacgaaaaagcaaggaagaagggaccagcccccccgccccagcacagccaggcacacaggcagacagcaccagaggaaggcagcaggaacaaagagggaggcgaaggcagaaagaggcaggcagcaaggagaaccgcccgcacgggaagcacggcagggcagcaagccccaggcaccgcccccccagccgcccccccggagaggacggccggccggggagagggcgggggggagacacgccgaagagagagaacagagaagaaccgagggcgggcccagggagggggaaagaacagaaaacaaaagaaaggaagcaacaaacagacaaaggagcgcacagcaaaggggcaaaagagcgccccgacccaaacgacaaaggcagacagaagggagcgagcaaagagaaggcgacggacagcggcaaaagggcgaacaccacagagcaggaaagagccgggcagcgagccgagcagccgggggcaaacacagcaaaacggacccacagcccgcggcagggaacaaaggaaaaggacacaaaagaaagaagagggcaaagggaaagaacacaggaaagagcaaccagagaacagagaccaaaagagcaaagccgacaggaaagagagccaccaaaaggaagaagcggccggcaggcacagagcccagaccaagaaagacaacaagggaaagggagggcccaaagaaaaaaggcacaagaccaaacacaaaacggagaaccccagaaaacagcaagcaacacaagccagcccacgccccgagcccaaaagccccacccagcagagagacacccccccgacggcgcggagggcacgggagagggacgcagacagcagcccgggaacgaaggggacccgcaggagcccagggcaggcagaagagaaacggagcccacgggcgcacgccaagcaacggggccgccgaaaaggggaaagaaaagcaagacacgagagacaggagccaaggggcccggggccgaaccccaaagccggcagaccagcgcagaggaggaacggagggacaggcagagcaaaggcaccggccaggcagcggccagcaggcagagacggaaggcacggaaacacagagaggagcagccccccgggaccaaagcacgcgcgcagcaccaccacgaacggaaggaggcagcagaagagaccaaagaaggaaggaacaacccaccagcggacaggcaggggaaagaacaggcaaaaaggccaaggcaaggagggggacccccaaagagcacaacgcgcgccgaaagccagcaagggaaccacggggcggggcggggcggggcggggcggggcggggcggggcggggcggggcggggcggggcggggcggggcggggcggggcgggaagcggcccaccgcaccccaggggagcggcacaaggaacacaagagaaagccagagaaccccaagaaacacggcaaagcgcgggcacccacaaaagagagcaaagacaaaaccaaaaggaagcaggccacaccaaacaacacagccaaacaaccggccgcacagagaaaaccccagagcaaaagcagggaccaacaacaagggggcaaaaagaccggaaaaggggcaaagcgagaaacacaaggaaacaacaaaccaaaggggaaagaaaaagccacccccgcaagacagggccgaaacccggagccaaaaccccgaggccagagacgccggcgcccccaaggcgggaaaaggcacaccaccacgggcaaggggccaaaaggagaaaagggaaaaaaaagaaaacgaaaaacaaaagaaaaaaacgggggccacaagggcaccggccaaacaaaccccgcccagccccggagcgacgggacggaaccaaacacacaacccagcaagagaaagcacgccagccaggccgccacagagagcgacagaagcaccaaaaagaagcgagggaagacaaggggaagcgcacagaccagcaaccgacacaggccccaaacagcaagagccaaaaaggccacggacagcaccacaggcgcgccgcaggcagagaggcccagaaggaagggcccggagccgcagacaaacagaggagaaggaagaagcagaaacagagaggacaaagaacacacaggccagaggcagagggacgcgaaacagacaccagacgaggcaaccccagacaaaggggcggcacaggcagaggcagccaacacaagggggaacacagcagcaccaggcaagcagggcaggaggagcgggagacacaccacgaaggcgcagcagaaagggcccaggcagcaggacagggaaaagcccaccccacaggaaccccacccaacaaggccacaccccaaaggccaccccgggacaagcaaacaaaccacacacagggaaggaagaaagagcaagaaccacaggaaaagaaaacaacaaaaaaaaaagaacagcgaacaaggcaaaggagaggacgaagaccccccacgcaagacgcaacaaacgagagaagccacgaggaagaagagcaagagccaggcagaggacagaccacaggggaaggcagcgaggggggaagcagcccgcccggcgaagacccccccagggcagccagaggcaggaagcagagagaccagcagaagcaaggccagaacagccccaagaacaccggggcaccgccaccaccaagggcccaagccgccccaaacagcacacacggggacaaggaaacacacgagagggacaacaggagcacccaaacaacacccgcccggccccccaggcgcgggagaagacagagacagaacacgcaaaacgggcaaccccccccaacccacaacaccgccggccacgcccacgccgcgaaaaacaagcagacgcaacagcaccggaacagaaacaccccgaggagccaggcgaacaaacgagggaaaacacaggggcagagagaaggcagggaccccacggcagaaacggcaggaacacaggagcaacacaacaagagggacaaggccaaaaaggggagaaaaaagcacaagacaagcaaagccaaaaggcaaacaaaagcacaaacaagaccaaaagaaaacgaaaacaaggacaggggggaaaagcaacagcaagagaccgcccaaaacagcggaaagcacacaaccacgaaacaaacagacacagagagaagacaacagacaggaaacaagaacagcacccaaagcaaaggccagaaaggcaaaaccacaaaaggcagcagggaaaaaggggcgaggagccaagccaaaaaagagcacaagaagaacgcccccaggggcagaaaaccccacacgaaagaccaccacgaaagacaagaccccccgaccccggagccagcgcaccagcaaaggaaggccggacaacacagggccagaacggaaggagggcgggcgccgagcaagaaaacccccagagagcagggcagcccgccagccacacagcagcccgcaaggcaccaagaccgggaacagcagaaggaaagggggcaaaaggggggcacaaaccagaaggacagccagagcccggagggaggacgcgcaacccgcccacagcaaggcgggcacgaggagaacacaacagacggggggaaagggcaccagagacgcgaggcggaacccagggaccacaccagacaggaggccccacaaacagaaaagagaggcaggcaaacaaaccagaaacggaggaccacccccagcaggcacgcggacgaagaggaaaacgagagagccgccacaaacacccacaggaccacacagcacgacaaaggccagaaaagccacgacaagcacagcaggaaaggagagcaaacgacaccaacaaaccccacaagaaggcacaggggccaaaaaaagaaaaacaaaacaacaaccagaaacccaaagggagccaagcagcaccaaacagaaacagacggaaccggaacaggggacaaacagggaagaaaaaagaaaaaaaaacaaaacagagagccgcagacagaaaccgcgccaacagaaaaggagcaagggaaccagaaccaaagaccaaacacaaagagaaaaccggcgcgacccagaacaaaaaaaacaaagccacggaacacgacaccacagacaaagaacacaagggccgcaagggaaccaaacgacgccccaggccccccccacagcccccagaccacgacaacgacacagaaaagaaacacacaaagagagaaagagcgcgcagacccaaaaaaaccaagccggaacaagcaaaaagagagagagcaagagggagagagagagggagggagggagggagggagggnnnnnnnnnnnnnnnnnnnnnnnnnnnnnnnnnnnnnnnnnnnnnnnnnnnnnnnnnnnnnnnnnnnnnnnnnnnnnnnnnnnnnnnnnnnnnnnnnnnngagagagagagaaagagagaaggaggagggagagagagagagacggggggaacccaacacagcaaccccccagcccccccaccgccccagacgcacccgggcaaggggcaacagacgaggagcgccgggccagccgcccagcgcccgaaagacagggcacaggcccagccccccccccaagcccacggcagccacaaaaccgaagggagaaacgaaccccacaccgcgcccggacgccccccagcagacgacgagggccagaacagccacaccccacccaagcccagcagccccccacaaagagcgcccggccccccgaccccagccacgggcgcagaaaggcagggggggagaggagcagggcagggggagggaagggaaccaggaagcagaaagaaaaaagaaaaacaaaaaaagaaaaaaaaaaaaaaaaaaaaaaaaagagggggaggaaggcaagcaggaaccagaaacagcaaagacgaaaaaccagggagagaaagggacagcagggagggcacaccgagcaacaaacccaaaacacgcgcacaggggaggaagaaaaccaggccgagcacgcaaaaagagagggagagggagagggagagggagagggagagggagagggagagggagagggagagggagagggagagggagannnnnnnnnnnnnnnnnnnnnnnnnnnnnnnnnnnnnnnnnnnnnnnnnnnnnnnnnnnnnnnnnnnnnnnnnnnnnnnnnnnnnnnnnnnnnnnnnnnnnnnnnnnnnnnnnnnnnnnnnnnnnnnnnnnnnnnnnnnnnnnnnnnnnnnnnnnnnnnnnnnnnnnnnnnnnnnnnnnnnnnnnnnnnnnnnnnnnnnnnnnnnnnnnnnnnnnnnnnnnnnnnnnnnnnnnnnnnnnnnnnnnnnnnnnnnnnnnnnnnnnnnnnnnnnnnnnnnnnnnnnnnnnnnnnnnnnnnnnnnnnnnnnnnnnnnnnnnnnnnnnnnnngggagacggggagaacccaacaagaaaaaaaaacgaaaaggcagagaagaacacagaagcgaccagaggcaccagaaggaaagacagagacagacggacaaacacgcagaaagcacaaacaacacaagaggaagacacaaaagcagaaaaacacacccaaggaaaacaaacaaagacaaaacaagccaagcaaacccacaaccaagccaacaacgcaaaccagaaagaccccaaaccaaacacgacacacgacgggaagcaaaagccagaaaagcaaccacaccgaaagagagaaacaagaaaagaagaagcaacgcaaaggcacaaggcacacagcaaggagggcacagccagaggaaccgcaaaggagaagccgagggcaccaaaccaaagacaagggcaacgacagccaagggaccaacccagggacaggaaaaaaaacgagacaggcagagagacaaaggcgggaaacgaggaggacgaaggaggacaggagaagcaagcgaaggaaaggcaagaggagaacacacgaaaaagagaggggccagggaaaggagagggcgaaggaaaggcgcagcacagagaggggggagaggagcaagggaagagaaggaagcagaagaggaggagagcaagcccgccgagcccgacagggaagcaccccagcaccgaaagccaccgcaaccgggaggcccgccccgcacaaacaggacaaaagcaggaaagaaaaaacaagcaaccaaaaagccaacgagcgaaccgcggaccccaaggagacacaacaaacacaagacagaggaggcagaaccagggcagaagggagccccgcagcaagggaagagggaggggggggcggccagcaccacacgccacaagcaaaccaccgcagagacagccaggggcagcagcacccaggccgacagcggccacagcccagggggagcgcggcccaaagaggggggaacaccggagccaggaagcccacccagaaaggaagaaacagacccccacaaagggcaaagccaggcaacaaggggagaccgccaaaaaaaaaggcacacacacaaaagagcaaaaccaggcagaggaaagaaaccacagcaaacaccaacacacaaaggaagcaagacagcacaagcaaacagacggacaagcaagaccagagcggcgccacagaagaggaaggccgcaacgcgcccgaaccaaaagcaccccaaaggaggcaaaaaacgagaaaaaaaggaaaaagaaaggagaaaccacaaaaacccccagaaaacgccccccaccacagagagcaaaaacacaaacaaaacccagaaaggcaccccgccgcaaaagagagaccacaaaacagagcagagcaaagcccaaggagcgcagggcggaacacgaagcaggaacccagcaaacaaaaaagaccggaaacgaagcaagaaggaaaagccaacaaagaacaacaaacaaacaaaaaaaaaaaaaaaaaaccgcaggagagagacagagcaaagcaagcgcccgccccaaggcaaggaaacagaaacaaaacagagcaaagccgaacacaggcacagagcccagaacaaagaagcaaaaaaagcccaagggggcgacggcagggcaacgacacagcggagacacagagaaaggagccaggaggaaagccccagagaccagcgaaggcaccaaaggacaagggggaaaggcccgggggggaccaccgggcggagcggcaaagaaagcaggcgagcaagccagggaggcaagccagaaagaacacccccaggcccgcacagcccgcccgaccgcgagccagccgacccgggagaacagcagaggaaggaagccaaaaaacccccccccaacgccggcagagggcaggaaagaaacccgacaagacaggcggcccacgaacaggaaggaagagggggggagccaaagacccagcagcaaacccacagcgaaccacaccccgccccagagaggacagccccaccaggggggaaaaca

SEQ ID NO: 725 - RNA, 364 nt, Mus musculus
agggggggacggaacaaggccagcccaaagcacccaccagcaccagcagccccaggcaccccaacaagcccgaaggaagaggggacacggaagagggcagggccagagggagaccaggggagcaggaaagagcacacggggcagggggccacaccaacccagcacgggaggcagaagcaggcggacgagcgaggccagccgccacagaggagccaggacagcagggcacacagagaaaccgccgggaaaaaaaaaaaaaaaagagcaccaccccaggagccagcagcaacgacaggcggcccagccgccacggcagggggccggagccgcgccaagcagggagcaaacgacgcccaggaggcgg

SEQ ID NO: 726 - RNA, 1502 nt, Mus musculus
gagccagaaaccggccggcacagggagaacagggagaccaggaacacccacaggggcggagcaggagcccagcagcacgaccacaccgccagggcccacggacaagcgcccccacagagggcagagccgggacgacaccagaaagcggagcaaaaaaacgaaccaggaaggggaaaccacgaacccgacggacccaaaaccgagaaccacaaaggccagaacaccaaaaaacccgagacccaggcaaagaacgaagggcaaaagagaaaggcggccaggcgggggggccacagggggcagacaggaagagaaacaccggacccccaagcaagcgggcaaggcagggagcagacgacgcagagccagagaagaggagaccagccgggcgaaaaagggccagcaggcccgggaaaccggcgacgaaacaaacaaggcggcggcaccggaaagagagggagcaacaccggaggaagggcagaagggggaccgggccaaggcccagagacaaacaggaggccaggcccgggagggacacccaggagccagccgcgccagcccagcgcgaggcagccacagagaccccaggaggcccgaaggcccccgcccaacccaagcccagggacagcggccccccaacccacccgcggagacagccgccccggcacagccgcccgcaccccagcgccaaaaaccggacagccagccagacagggggacaccaaacccagacaagaacaccagacagaacgccacaaacaaagcagcccagacacagagcagggggggcgggggggagggggaggaaaaggaaacgacgaggcaagcacgaagagggggcagaacaggcgaaggacagggaaggcgcggggaccccagcgcagggagaggcacggccagcccacaccccccgccggccaacgcaaccaagggaaggggaggcgacaacgaaaagaggagaaccgagcacgcaggcacaccgcgaggcgcggcgcaagacggaagagaagcgccccaggggagaaggggaccacagagccaggaaccagaaaggcgccccaaagagaggaaggaacaggccaaacgccgaagccgcgcccaggcgagacggggccagagccacccagcggacgggcacggcccaaacaagggaaaaaggaacagaggccccgccagaaaaacagaaaagaaacaaaaaggacagggcgcagaacccaggccggccgaaccccacccgcacagccccccaggcggggaaaacagcgcgcggccagcccggaaaacccgcagcaaaccaccaagccccaccagcaccaaacagccgagcagggccagcacgaaagcgaacgaaaaggagaaccaccagaagaccggggaccaagcggaaaggacaaagaacagagaagaaaacacccaggaaggacacacacacacacacagcaggccccagacggagacacagagaaggaacgggaggccgagggggcagggaccgccagccagcg

SEQ ID NO: 727 - RNA, 6971 nt, Mus musculus
ggcaagggaaacaaaaacgcgcaggccaagggaacgacacgaccgccccagaacgcagccggccagggcgcagccaacagggaggagcgccaaggaagggcacccccaaaggggacggggccgccacccccgcggcacccggccgcgcgcccggcgccgccgcgccaaagagaaacaaagagcacgccgcgcggcgcgccggagccggcccaaaaaagaggggccgcggggcgggcgcgggcacgccccggccccaaagagagcaaaaaggccgcagaagaggcggggcccggccggcggagaacgcgcaaaacaagggccgaaccgggacgagaaaccgggacgagaaaaaaccgggaagaaaaaaccgggaggaaaccgggacgggagcaccggcgcagggaagaccccaccagaaccagaacgcgggcgcggaaaaaggcccgaaagcagacgaagaaggacaacgcagaacagaaccagcggggaacggcggaacccgaagaagcacgaggaagccggccgaaccaaggaaacaagacagcacagaagaaagggaaaaagcaaaggagggccgaacccaggagaagcccgcccacagacaagggaaggcagggcggacggagaagcaggacaacacagaagaaagcggggagagagaaaggagcaaagagaaaaaggacacaaaaaagaacaggccccaagggcgaaccgaggaaaagaggcaggaagaaaccggggagagaagaaggaaggagaaggaaaaagaaaagaaaaaagacaaagagaagccagcagagcgaacagagaaaaggcaagggccggaaggcgcccccgagcagggaagccacggacaaaagacagaggcaggccgcagccacaaggcagccacccagaggagacaagaaaaaggggaaccaggccgcgcccaaggccaacacaaggggacagaaagccaacaaaagccaagccacaggcgccccggaccagagcgcaagagggaagcacgaaaagacgaaacaaaagccagaggcaaaacaccacgaggggaaaccccgggcgcaggccaacaggcgacaaaggagcacgcaaccccgagagaaacaaaacagagaagaaacccacaaaaagggagggaaacgaggacaaaaacggcaagggccagggcaaagagggagaccaaacaaaaagaaaacacccaagggagaagagggagaagaaaaaccagaaccccaaaggcagaccgagggaagcagaaacagaagggcggaggaaagccccagagaggccaaacagcagaacaaaggacagaagacccgaaaccagagagcccacaggccaccggccccaggccgggaaagaggcagaaaggccacaaagggggcgcgcccacaccccggagaggcgcaagaaacaaacaacaggacggcgaaacaacgcagcgcccgacaagaaaagagagagcagcggggggaaagcgacaccaccccaagacgggagaaagccaagacccgcaccacaacagaaacgggggccgacagacagccggccgcggacaggccagacaacgacaccaaacacgcagcccaggacacagcaagaaaacaggcccagcaagcaagaacagagaggccagcggaacaaccaagacgccagaacaacagagaagacaaaaaccagcagggaggaacaaaagccgggagggaccacagagaaaacagggcagcaaagcaaaaagccagaagacagaaggaggcgaagaacagacccgggaagagaccaggcaacccacgcgcggaccgcgcgaccaaaggaacccaaggaccccagcaccaaaaaaggggggaaaacaggagaacacgcgggaagggccgaggcgaagcaaggcccaaacaagagagacaaggggagcccaggcgcgcaggacagaacaggagcccccgaaacagcaggcaaaggcgcggccaccagccaacccagaggcagccagcacgggaagaggagggccagcagcccgagagaggcacggcaagcacgcaaggaaaggccgcggcaaagagccacagggagacagcaccagaaggcaggccagccccccccaggcaaaacgacacgggagcaggcaggggccgggaaaagccggagccaagagcaaccgacaggcccaccacacacggggagacccacccacccaaaagggggccagccaaaaaggaaagggggagaggggagccgcccccacacgccgcacaagaggcggacaccggcaagggaaacaaaaacgcgcaggccaagggaacgacacgaccgccccggaacgcagccggccagggcgcagccaacagggaggagcgccaaggaagggcacccccaaaggggacggggccgccacccccgcggcacccggccgcgcgcccggcgccgccgcgccaaagagaaacaaagagcacgccgcgcggcgcgccggagccggcccaaaaaagaggggccgcggggcgggcgcgggcacgccccggccccaaagagagcaaaaaggccgcagaagaggcggggcccggccggcggagaacgcgcaaaacaaaaacacagggacagggccaaagaaaagcccggaacaagaggcacccaaaggaagggagccaaggcacacaacacaacccaaggacgggcccacagcgggcaggccgcacagggaacacagagagcgcaagacaggggaacgccgggggacgagccagagggcgcaggcgcagcccacgccaagaaccagaaccagaagacgccgcacaccgaaccccccgccccccccacagacgaccagcccccacccggcaaccagaacccgcccccggccaccgagccacaagagaccaggcagccaccagcaaaacacccacaacggcgcggaaggccagcccgagcaagacagacaagaaagacgagccaagacccgccccagcccccgagacggacaccaccaaggggggaagcaccaacccagcaaaagacaaagagggaaacccaggggaaacacaacaaggacccccagaaaagggagccgaaacgagcaacaacacacgagaggaaaagaaacaaaaaacggaacaagaggaaccccccagagccaaaggggaacagaagcaccacacccaccaggaagagaaaaagaagcagggaggggcacagacggacacaaagagacagagagcacggggcccacaccgccggcgggagagaaaaaagaaaggccggcaagcccagcaagcaacggaaggcaaagaaagcaagcacaacggaaacggggggacaggcacaggcagagccaagcacagaaaaaacccaagcacgaaggagcaagccagaacgaacccccccgacagaccgccgaggcgcccaggccacaccagcagcaagaccaaaacaaaacaaacaccaaaaaaccgaacccagcgagaagacacaaaaaagaaaagacaagaaaaaaggcagcggccccacaagaaggaaaagagaagacgaggccacagggcccccaaaggaggcgggagaagccaaacagaaggagaccagaaaacggagccaaacaacacccaggacaaaggacgacaggaacccccaaccaccccacacgcaacaccggacacagccgggcaaccaaacaaccgaagccaaagccccccccccgaacaaaaaaacgccgcaaggccccacacacccagagaagccggcagcgacccaaaagcgacaccaggaggggcagagacccgcaaaaccagaaaacacgacccccagcacccagaagagacacaacgggggacaggcaagcagagggaagaagaaaagaacgggagccaaccggccaggcccaagcgcgcagggaagggcaggcaagcgaaacccgaagagaaagcgcaccacaggggggggggaggggacagcagaaaagaacagagacaaagcaagccagagcaccacgagcacccacaagcacacgcacaaaagaaggggacaaaagccagggaaagagcagccaggaaaacagcaaccagacccgcgccaaggcggaaggaggaaccgagacacggcaccgggcaacacaaacacacacaaaaaaaaaaaaaaaacagggaaaaagagagaaaaaagcgcggcgggaagccacccagcaccaggaggcagaggcaggcggaccgagcgggccagccgcacagaggagcaggacagccagggacaggagaaagccgcaaaaacaaaaggaggaaaaacaaaagcgaaaacgccgcacaacgcacacaagcacaacccaccccaagaggaaagggaacggaagccaaaacggaaggaccaggccaggaacacagaagcacccaaccagagcaaaaacagaacaaagccaaacaagaaaagagacacggcgaccagacacaccagaagagggcacgacccaacagaggggagccaccaggggcgggaagaaccaggacccggaagagcagcaggccaaccacgagccaccccagcccacccccccacccccccaaaacaaagcaggcagcaaaaaagggaaaaaagaggggacagccaaaggaaaaaaccaggcaggcccgaagcggcgggagccagcgaggggaaacggacaagaaacacaaaaggcagccggagaggcaaacacaaaggaggcaaggaaggcgcagaggaaagaaacccaggaacgaaagaccgggccgaacacgagcccccacaacacaaaaccaggagccggagaagagagaagggagccccgggcacccacacagcccacggcacaaaaaggcagagggagggaccaaccagcgcaccgacagccgaggccgccccaggaaggaaccaggagaaaaccgcaaaagcccaggcgaaggaaaaccacagcagggaaaccccagagaaaggaggcaaaccaaaacaccagagacacccaacgggcaggggagccgacaggggcccgggaaagggacccggaaaggggagacgagggacgcagccagcaggcaggacacaaaggaagagcaggaaggggggaggagccgacacgacaggacgcacaccagaacccacagcagacagcacacgacaggccagcaaaacccagcgggagagagggagagggccccccaggaggagccaggcaccaggcaggaggagagccacccagggggggcacggaggacccagccgggggagccccccgccccggacacagggcagacaaggaccaggggggggcaaaagaagaagaggaagagaggggaggggcccagggagggggggcaggggaagggagggggggagaagacaaaaacaaagacaagaaaccaaagaacaaaacaaaaagacaaaaaaaggagggggggaagacaacaagagcccaagagacccaaacagagcgacgcccaaccaccaggcaggaacaggcaagggagagaacgcacgccggcaaaaggcacccagcaacaacccaagggcaacgaaaaaacacccccaaaaagaaaccacagaaaagcacaccaggccccaagaaccgggggggccaccgggccaccagagcccaggaagaaggaagaggaggaaccggagagcaaggggcacagaaacaccaagacaagcgaccaagaagcaggaaaccagagggggccagcgaacccccacggagagaggcaggggacccacaaggccaggaaacagcaccaggcacaggaagagaccgcccaaaaaggaagggaaaagaggaacaaaaacaaagaacaaccagaccgacacaagagacacaccagcgcacccaaaaagagccaaggcacacacacagaggggccgcaaacacggagaagaacgccgaaaaggaacaaaaaaagcaaacaaaaaaacaagaaccgagagcacgacaaagagaacaacaaacagagcaacgggccggaaaaaacacacacacacacacacacacacacacacgagaggccagaggaaaggaccgccaagacgagcgacccggacccaaaccaaccccaaaggcccgacccaaccgacggccaccgcacccgaaaacaccaccacaaaaaacaaaaaaacaaaaaggggcggcacaggcagaggcagcagacaaaggggaagaggcagaccaggcaggcagggcaggcagagcgagagcagccaccaaaggcgcagggaagcgacccaggcaaaggggaggacagcccacacccacagggcacaccacccaaccaagcacaccacaccacaaaaaagaaaggcaaaaaaaaaaaccacaaaaaaaggaaaaaaaccccacacacaaacaaaaccaggccgcaaagcagagcaaaacaaacgagaagaaaaacaaagaccaaaagcagaagaaaaacacaaagaaaaaagacagagaaagcaaccaaaaccgacacaaacacgcggaggcgcgaagggcagccagagaaaaaaccaaaaaagcaagccagggagaaaagggagccccacgcgccaccgaaggaagcagaacaggaaccaaacagggcacgaacaaaccggaggcaggagcgagcagaggccaggagaaggcgcacggcgccccagacaaccccgccacagaaccgaaccaccagcccagggagccccacccacaggggcgggccccaaccacaacacaagaaaagcaggacgagaggcaccaagaggcccccaaaaacagggcaagaacaaaaacagccagcaacagggagacacagagagaaacccgaacagaccagaggcaccacccaagcgcaaaccgaagacagaaaacagagaccccccccaacacccccccacccccaccccccaccccccccacccagccagaccccagggaaacacgaggggccaagcccccggaggaaaaggcgggccagcagagcgcacaggaagccggagagagccaggagcgccaggggccaggacac

SEQ ID NO: 728 - RNA, 10254 nt, Mus musculus
agagagcgaggggggagcacccaagaccaagcgaacaacccaggggaaacacgaaaagcacggagagaacaaagcaccccaacgggggggggcaagacaggcccagagcccaggcggccggaacgacaccagcccccaagaacgaagccagaccaaaaagagacacagcaggccaggaaccaggcggccaaaccaaaaaccaacacagccagaaccaaccccccgcccaagggcaaaacagcaccacagcaggagcgcaagggacaaacccagggacacacagccaagcaagcaccgccaaccaggcgaaccagcaaacccccacaccgccgggacccaacaccagcacaaagcccagccacccccacaaaggaagcagagggcaaaacccagacccaacaagggacggaaaacggagacagcccacaagccagacaagcaacgcaccacggaaagcagcccagaaaaacaggagagcagccaaaagccgccgagccacgaaccgacaacagccgaccaaagcaccacggggaacaagcacccagaaggagcagggagggcagaaagaaaacaagagagcccaacaaaagaaaagggaagacaaggaacaaaaaaaaaaccgaccgagacagaaaagaacccccccgccagcaaaacgcaagaaagccccagcacaccaggaaggggccgaagcaggaccccccagaacaacagccccccccccccccacccgcacaaaccagacagccaacaaaaagacccgaggcagacccagccaaggaggaaagacacagaaccaccggagaaaaaaccaaggacccgccgggcacccgagcacaaccagacaagaggaaagccgccacaaccgcccgacggaaaggaacccgagggggaaccggggcccagcagagaggcaggcacaccacaaccaccccgccaaaaagcccagcagacaaaagaggggagagaacgggaaacagcccaaaacggaggggcccggaccacccacccagcgcaaccgaagccacaaacacagaggaaggaaaggggagaggggaggacggcaaaaacagccagagaaggagagagggggagacgaagacgcggcgagcgacaagcacccacagcacacaaaagccgaagcaacaaaaaaaacaacggcacaaagccccaaaaaagagcgcgaacaacacaggacaaaaaaagaaaaagaagcgggcaggaaaacagacccacgcccagggcccccccccccccccccccccccgcgacgcagagcaccaagacagagacggacagcaagaggaagcaaacccagagagcaaccccaggacccaacagagaaagagcgaaccaaccaaggcccgccaaagcacacgcggggcaacaacagcacacacaaaaaaaagccagaaagccccaaaggcaccaaaggaaaacaaccgaaaaacaagaacaggaacaaaggggaaaaagacgacaagagaacagccacaaaccacacagaaacaaaaaaacagagagaaacaggcaggcagagggccacagagcgaacaacagggcccacagaagcaacagaagcaaacccaaaacacaggagagaaggaaccacagggggcgggaccacccaggccggggaacaacaggaaaacccaacacgagcgccacacaagcgaggccaggaccccaggcgcgaaccagaacacaaggggacagccaaggcaaagacccaagggaagcagagagacgagacagaagggaaaacagaccgcagcccaccagaaggggaggagacaacaacaaacaacacaaaaagacagggagaggccgagaaaagccacgagccgcgagcaccaaaaagaagaagaggcaaacaggaacggccacagcaaccacccaggggccaggcaggacaagcacaaggaagaacaaaaggaaaagagggcccacccccacaggagaaagcgcccggcagaaaaaaccacagaccaacgaaaggagaaagggaaaggcacaaccaggacgacacagagagaagccaaagggaggagcaaacagcggccccacacgcaaacggaaaggagagagcacgaacacagcgccacaaggcccaaacagccagggccccgccagcaacagacccagcagaaaaaggccacaggaaggaagagaacaagaggcacggaaaaagaacacacagcccccacaggggccagaggccgccccagggcaaggcaagaagaccacaccaacagcacgagcaacaaaacccagaccccgaccacaagaccgggaaacaagcccacacccagacaccggggggagccagagcccgagcaacacaagcaccagcaacgagcagccaggcccaaacaaaagaaagcagaaagaacaacacgggggagacagagacaacaaaacagcacaagaagccacccaacagcaacaaagagagcggcgggcaggcagcgcagagacccggcacaaaaaagcaaaacagaagaaaaaagcaacaaaagagaaagagcaaaccgaacgaacaacaagagagcggaggaaggagacaaccccccccaccgggagagggggccacggagcacaggcagccaaaccacaacagcagcggaaaacccaaaacccccacgcagccaacacagcaagcaccaggcgacaacaaaggacaggaaaggaaggaaggaaagcacacaaaacaaggaacagacaaaggaaaggagaccggcacagcagggggccaggccagagcaaagagccacgacgacgccgccgccgcgagggcccccccccgccacggcccgcgcgcgacggagcaccgccacccaccacacccaaccccggggagacgccacccgaccaagggccacagagacaaagcagacgagaaaaccagcaaaacaagcacccaccaggagcacacagacaacagcagcagcaccccccccccaagcacgcaaaagcccgcaaacacgaaaagcccccgagggagaggaccccaaccgcaaagaaaaacagcagcccggcaaaccccgaaagacaaccaccaagaccccgccccccaccccacccgaacgaagaagaaaaaccgcgcaaaacaacgaagacacaaaaaccagcggcaaccaaaggggagagggaaaagcaaagcaaggagagcaggcccgggggagcaggagagcaacagaaaaagacccgcaaacacgaggccaagagcagccagaacccagagaaaaaggcaagaaggaggggaaggacaaaaacaaagaaaccaaaaaaaaaagcaaaagaggcaggaaaaaaaaaaaaaaaaaaaaaaaaaaaaaagaggcagaacacgagccgaggcagccagacaaccggggaggccggccaagagaaacgcccaacagaggacagagccaaaaagaacccccaacacaccccaaacgaaaaaagaacaagcagaccaggacaacacaaaaaaaaacagaagagaccagcccgagcccaggacagagaaacacaaacaaagcgacccaaacaggacaaccacgcccagccccagaaaccacacacagcgcccaaacaaagagacacacaaggaagcaagagcagaagaacaagagaaagaagccacccacaaaggaaagaagacaaaaagagaaagaaaaaacgcgccaaggacaagccggcaggcccaggaaggcacacaggcagacacgagcgcccgccgggggcgaacaaagaagaaggaccaggacacaaaagcccagacacagaagcaaggggcacagcagccaggcaagcaagagaaaggagggcaccaaaccagagccaaaggcaagagaagaaaggaacaacaaaccaaagaaacagcggggaacagcccagccaacaaggagacccggccacccagcaccaaaaacggcaggaccgcaccaagcaccagaagcaggaacgaagccaagcacagcacacaggagcgcgcacgcgcccccccccccccccccccccgcgcgcgcgcgcacacacacacacacacacacacacacgaggcaccagcacaccagacagcaaaaacaagaaaacacgccgaaaaagaaaacagccaaaaccagcaggcacagagaaaggcccaagacacccaaagaacaggaccgaggaaaaggcccagaacccgcaacgcacagcgccagacacccgaggagagaaccacaaggagcaaggaagagcgacgaacgggaggagacagggccagcacgaggccagccaaccacagagcaaagagaccggacgaccccaccccccgaacaggagcaagcaggcacagcgagggagaccaggaccccgaggcaagcgagcccaaaaaagagaccccagccgacgcaagaacagaaccaagccagccccacaccggaaaaaaaaaagcagagggaagaggcccagcgaagaggccgaaagaaaaccgagacaaccccggaacaaagaaaaggagcagggggagccaggccacagccaagcggggaaagacccaacaaagaagaagggaagagggcaaggagaacacccaacaccagcaggcccgcacgacaaaacagccacagagggggaacaaacaagcaacaaacaacaagcacaaaaaagggagagaaagaagccaacagaggaaaaaaacacaccaacagccagaaaaaaaaaaaagagagacaaaccagaacaaggaacagaacccggcccgccccagccccaagagggagcaggcggaaccaaaacccacgaaaaggaaaaacacaaggacccccggccccccacaaacacccacacacccccaccccgccagaggggcccccacccacccaccacccacccccaccacccggaacccccacgaggcacaagcccacagaccaaggggcccccccccccacaagccagaaaggcccccagccccagccccccaacccccagggcccggccagcccaggggggggagcacgcacgggaaaacagggcgcaacccagaaccacggcaccagggggcccagacaggaccccaaccacgaagcaggaccaaggggacacaggccaacgaaagcaccagagaggaggagggagaggcaaggaaaagaaggccgcgaaaccaggggcaacaaaggcagaaggaaaaaccacaccacaacaggcggccagccaaggaaacagaaagaagcaaaaaaggggaaaaacccaacaaaacaagaagaaacgaagaacccagacaagccaggaaaggagcagcggaagagacccgccaaaaaaaccaaaaaaaaaaacaaaaacaaaaacaaaaacaaaaacaaaaccgaaaacaacccagaaagacgagcaagcaggagggaaggggcgaggcgaaggcggaaaaaggcccccaccgcaccaggaccgcggggggccgcacaccgccgacaccaccaggagacggacaaagggcacccgacacacagagaccagcccggccggagccacgagcacccacggcacgaccagaaaacggggcacaaggagaagcaccggaggcgaaccacgagaagccgaaccgagcccgcccaccccagaaacacagcgaagcagagaaaagaagaaccagcccccaaggaaggacgagggacccaagacaagacacccgcagcccagccaacagaaccaaagacaggcggccagagggaaaacgccccgacgcgggaaacaggcagcacaaccacaccggggcaagaacagggagcaagcaacaccaaccaggggggggggagagagagagagagagagagcacaggcgcacagacacacgcagggggaacagacccgcaagcaacccaggaggacccacaagaggggagccgcggggcaccaccagggagcgggacacagcagcaccgaagcgaaagcaggcccggaagaaggagcaagcaacaagagccagcagcccagacaaccgaacaaaaagaaacaagcaaagaaagacaacagaggaaacagacacacgagacacacggggcagagagccccaaaacgcaagagcgaggacaacaagacggacaacagcaaaggaacacaagcacacaaagaaacaaacaggcacaaaaagcaagaaggcccaaaaccaaggagagggggcagggccagaggaccggagaagcagaagaggaacggggacaccaacacgggaaagcagggggggacaacagaaccagaaccagaaccacaggagaggcggggcaacaaggcgcacaaggaaagcgagccagccagcaacagcagcacagaaggagaaggaggggggaagaggaagaggaggaggagacaagagagcagggaaggggagcacccaaaaaaacaacccagcaggacaaaaagaaaaaaaacgcaaaaacaaaaaaaagaaagagacaaagaaaccagacgaccggaaccaaggccaaacccagacagggcgacagaagcaaagcacaacacaaaggaaaaggcagcggccacacgagacccaggacaaaccaaaaaccagcgaacggagaaaaagcagaagccaaaagccacaaagaacaggacaaaacaacaacaacaacaacaacaacaaagcacgggaggggcggcaaaaaaaaagaaaccagcaaggagaagacaaaagagaaggagccgggcagagacaacagaaaaaggaaaagagaaaagaagagaagagaagagaagagaagagaagagaagagaagagaagagaagagaagagaggagaggagaggagaggagaggagaggagaggagaggagagggagagggagagggggagggggagggggagggggagggggagagggagagggagagggagagggagagggagagggagagggagagggagagggagagggagagggagagggggagagggagagggagagagggagagggagagagggagagggagagagggagagggagagggagaggagagaaaaggggcccaaaccagacaggcgccaggaacgggaggggggaggagagaccaaaagagccaagaaagagagaaaaaaacacaggcaagaggaaacacaaacagggagccgacccaacacgaaggacacaaaaaagaggaaacacaaaaaggcaaacaaaaaaaaaaagacacacacaaaaggagacgagccaccaggaaagaagacaaggagggacacagaaaaggaggccaaaacaaaaaccagggaaagaagccagaacgggaggcccgagcacaggccagggcagaacacaacgagaaaaaggaacccagcgggcgcagccagcaggaggcgccagcaaaaacaaagcccggacacccaaacacaaagcgagcgcgaagacaggaaccacacgggagacagaggcagaagacagaagcgacgcacgggccagagcagacagcgggacgagaaaagacaagaaagaaagaaagaaagaaagaaagaaagaaagaaagaaagaaagaaagaaagaaagaaagaaagaaagaaagagggagagagggagggagggagggagggagggagggagggagggagggagggagggagggaggaaggaaggaaggaaggaaggaaggaaggaaggaaggaaggaaggaaggaaggaaggaaggaaaccgcggacccagccaccagcaaccccacagcagagaaaaagaaagagcagaaaaggacagcagaaaaacgagagccacaacaagcccaaaggcagaggaggggcggaacacgggaggaggcggcacaggagacccgaaccagcccagccagagcagcaccaaaaaaagacaagagcagaaggaaaaaaaacaacccagcagggaaaaaggaaaaaaaagaaaaacaaaagaaagagaaagaacgaaacccagcacgaccagaaggaacagcaaacccagcgaccagcagacagcgcaccggaggccaacccccggggggaagaaaggaacaaagggagggagaaaagggaaacaacacgaggcgaagcggaggcaccagaccgccccccccccagcgcaacccaaaccgaagaaaggaggaacagccacagaagcaagagcccaggaaggagaaaagaccgcacaggaaaagaccacaagagaagaaaggaagacgaaaacccgcaaaaagccagaagaaggaagagcggcaaaagaaggccgcacaaaggcgcgcaagccaccgggaagacagcagggcaccgccagagcgggacaacacacacacccaaaaaccccccccgggccacaaagcgcggaacagaacggggcacccagaggggagcagcggcaggcaggaacagggaagggagcggcagcgggagagggagggcgccacggcgggcgaacagagcgcccggcgggagagaagcccagaccccgccgcccccagcccacaaaccacaacccgcgccgcagcagcaacgggacccgcacaagcaaaggccccaaaagccagagacgcaggcagcacgccccagcaccaggaaaagagcagcaaaagaacagccggacaaagggaaaagcaggccaggacaggcgcagcagccagccccagcgcaagagcgcgccagcgacgggcacaggaaagcaacgaggacacaggggccagggcaaagggcgggaacagcacgggaccacaagaaagccagggggaggcacacgaacccaggcacacacgaaagagacagacacaggaaaacccgggagccacaggccaggaacggacagacaggaaaagagacgcgccaaacaaggaggaagacaaggacggccccaagggcccaaccccacggagcaccagacacaggaggcagcaacacacaaaggaaaagaagagagggggaaagaggcagggaaagagcacgacgccccagaggccgagcaaccagcagccacaggggccgcaaccaccaaagagagcggcacccacggggcgaagacaggcaccaaacaaaaaaaaaaaaaaaaaaaagaacagacccacaagccaaaaacaaggaggcacaagggacaggacggggccagcaagagcagacaaagccccgaaacccccagacacaaaaaccaaaacagcagacagacaaacgagcccagcacagaagggggcacaagcacagaagcaaggacccagcacagggacagagacgcccaaaacaaaaacagaaagagaaaaagagaacgacccacagcaaagcagaggggcggggcagcacacggcagagacccaggcaaacggaaggagaccagagcgaaccacaaaagcaagccaagaggcggaagcagcaggggcacggaggaagaggcagagaggagcagggccacaaagggcaaaacaaaggaaccaaccccggacagcgcagcaaagggccccaaggcgacggacaaggggcccagggaaaacaaggcaaaagccccggggcgcgaacaaagaccacgacaagacagcaaggaagaaccccagcaggaacaaggagagacaaaccgggaccaaacacaggggcggcccaggaaccaggaagccaagagaacacggccggccagacagggcccccaagcgcggcgcccgaagccgcgcgacacgcgccgacccagccaagccccccccaaaaaaaaagcaaagaaggggaggggcgagaccagaccggagcccggcgccgggaaccaccaagaccaggcagcgaaccaaagaccccgccgggcggagcgggaagagggcgcaccacgccagccccccaaaggagcaacacaagacaggcccccaaaagcaggaaaaaaagcacgacaaccagagcggggagagccaggagaggccccaagcagcgaaggcaggcggagcccagaaaacgcagggagacaggaacccagcacagaaagagagaaggaggacgaagcagagaccggcacagacacgcacaaggggggaacacacacgcaaagaccccccccccaaaaagaaacacacagaggaaccaggaacaggacaacacaagaccagccccgcgccgagccacgacagaagcaaacacgaccgcgcaggaagaaagaacagcggaaaagccaaggggcgcgcccgaccccccagcagggcgcgacccgcgcacaagaccgaagaagccccagacgagcccggagggggccacaggcacaaagaaaaaaaaaaaaaaagcaggcccacgggaaggaggggcagagggggccacacccggcgggggcagcgcaaaggaaag

SEQ ID NO: 729 - RNA, 3357 nt, Mus musculus
aaggacaacaacaacacgccgcgcgcccgcaggaggccgggacccacagaacagaagggcggaggcagaacaggggcacgcccccccgggagcaacagcagaggacacaaaccaccgccccccagaggaggcaccaacgccccagggcagcacccaagggacacgccaacaaaacacagggccagcagaaaggcgccaccacaagaagaccagcaccaacacagcacccagggaaaagagcccagggccaccaggaacccccggggcgggaggcagagacaggcgcacccgaggggggagcaccgggaggcgcggccagcagaccaggagaggcccgccagaaaaaaggcgaggcccgagaaaggacacccaaaggccggccggcacagggacaggcacccacaacagcaaacacggcaacagaaaaaaaaccacacggaagcaaaggaacacgagaccaggacccggagcacgcaggcgacaacgaagcagggggaggggcacggcacaccacagcacgcacgcacgcacgggaggccaagagccccgccacgggggccagggaggagcgcagggaccgcggcccaccccggagccaccccagacccgcggcgccgccaggagacaagccaagaagaaaacaagaccccccaccacagagaaccaagcacgccaaaaaacaggaagcaaaacaagaaaagaaaggggaggaccaggcagggagagcgggaacaacaaggccaccaaccaggaaccggacagagacagccagcggcaggcgaaagcccacccacacaaccacaggcaacgcccgggggacgaagacaggcaccacacccccagaggagcccagcgccgcgccccacagccaccgaaccacacgccgcaggggccagcgggaagaggccccggggggggaggggcgggcagcgggggcgggccccaggcagcagaacagggccggccaaccagcggggaaagaggacaacccccccccccccgccgccccccccacgccccaccaaaccccccccaacccagccacaccaaagccacacccaccccccccccacccccacaaaagcccccacccccgcacgccgcacagcgaaccgaggaaggaccacaaggacaggccccgccaaccccgaccgagggaggagagagggaagccagggagggaggcaaggccgacccccaggcacgaaggccagagcaggaaaaccacccccaggcccccggcaccaagagaaggacacagagggagggaaggaacagacccggaagcaagcagaaaagaccaaaggagcgacccagggcagagggcccggaaccaacgagagggacacgagggacgaagcgggccccagagcgcaccagggcccggcgaggaaagcacgcaggcggaaggaaccgcacaaccccaccaggcaccaagggagagaacagaccaccgaggaggaggggcgcagcaggaaccagaggggaaaggcaagagaagaagaggcgcaggacaggaagacgagagcaaggcaccccagcacaagcaacccacagccgggagcgagaggcagaaagacacagcgcaaagccacgccgaggacacaggacccacgggaggagcagagaagggaccacaggcgacagccagcgggcacaaacacacaacacacacacacacagaggagagagagagagcagagaggaggcccccgcggcccaccggccgccccaacaaaagcgccgccacacccacgaacccccagcccgggaaaagagagccccgcccgggggccccacccggccggggaaccggcaagagcagaagcacagagcaaccccacgcagcacgaaaagggacccacagcacggagagagacagccaaccggggcagcaaagccgcaagaaaaaaaagcacaaagacaaacaaacacaaaaaaaggagaaaaagcacaggaaaccacaacacaaagacaaaaggcggcggcaggagccccaggaccaccacccagggccgcgggagacgggcgggaagagccgggcaggggacagccagccagccggacccccagcaccgagaaaaccaggggaagggcaggccggaggccgggcgcaaaaaaaaagccgcagggcagcagaggccagaacacggaagaccagcgagagcacgaccgagacggaaacagaggggagcgccagggggggcgggaacaaacgcacccggaagcagcgggaccggcccaccgacgacgacgacgacgacgacgacgacgagagacgagacaggcgagggacaacccagcgccggaacccccgagaccaggcggcccaaaccagaggcgcgcccgccccgaggggggaaaggacgcaccacgccggcaaaaaaaaaaaaaaaaaaaacaaaacaaaaacaaaacaaaaccagggccaagagggacagcccaaacaacacggggaagcgagcaggagaagccaagcaaggccagcgggcacaagcaggccaggcaaacacaggaagaccgcccgaaaaagaagaaaaaaaaaaaaacagccggggggggcggcgcagccaaccagcaccgggaggcagaggcaggcggacgagcgaggccagccggcacagagggagccaggacagccagggcacacagagaaacccgcgaaaaaaccaaaaaaggaaaaaaaaaacaggacagaacaagaggcacagcccagaaaggaagcaagcccggcaacggggcagcaggaaggggcaggaaagaaaccgccccggacagggagaaggaacaaaaaaaaaaaaaaaaaaagagagaaggcccagagggaggcggcaagaaacacgcaagaggaccagcagggccggcgccggccagccaggagaccagaccccggccccggcccgaggaagccgcgcagcacaagcacacaccaaccaaaaccacaaacaaaaaaaaaaaaacaaggagcccggggccccaccccgcagacggacaacggagggacaggggagcgagcggccagccaggggaagagcccggcaggcccagagaacaaaccgagccacacacagcacccgaaaaaaacgagggcacaaaacaaacagaaagcagaaagagaaagagccggggagagagggagaagggaccgggagcgaaacaacgcacggcagagaaggcagcaaagcacaacagaaaaaaaaaaaaaaagaggcacccgaaagaggccgacaaaccgacaaagaacagcccagggcccggggggagcggaggaaaacagcacaagggcccgccggggaccacgccacaaacaacgcacaggaaagaaaaacgagaaaaaaaaaacagacaccaaaaaag

SEQ ID NO: 730 - RNA, 3522 nt, Mus musculus
  misc_feature (2770)..(2895): n is a, c, g, or u
gcaaaggaggccccccccaggcaggcggcggggccagaaggcccgcacgcagaggcaagacaaccaggaagaaaaggaaggcagggaaaaggaggcacgggaagcgaggcaaaggaccaggccgacgacaccccacagcagcaaacgaggaggacaaccacccgagggacgggagaccggacgagcgccggcagaccgccggagccaggggaaggaggaggaggagaaagccgggggaacgacaccgacaggaaaaacaagcaacccagaaaagcaagaagccaggcccgacagagaaaaaaaaaagcccccagaaggcagcggggcgagacacaaggacgcagagaaaaaaggcaacgagggacaagcaacccggccccaaaggggggcgcaagcagaagaaacgcaaaagcccaggaggggggggaaagacaagcgaagagcaggaaacgagggcccagccgagccacccgcacaagcagacacagagacaaaggacagcacaaagcccgggggccgacaagaagcaaggagaacaccccagggccgggggcccgccaccccccacgagcacagcacggcccgcaaacacaagaaacaagacacaaccccccacgccccaggcagacacacgcagcaagcggcacaaagcaaccccccgcccccccgcgaagcacggaaccgccgcgacaagcacccccggagggggccaccgagcccagagccgggcaggcagagcagaaagcgggcccgaacgcagagagaggcggcgggggaccgaagggggaggacagcaaagagaaccccagcccggaaagaagcacaacacccgagggacagagacacgcaaaggaggagcgagggaaccagaccgagcagcgaaagcggaagaaggacaaaaaagaacaccagaaaagcacaccacggcaccaagcacaggggggcgagacggcggagcagcagccgcgcgccggcagagggaccgcgacaacaaaggacagggaaaaaaaaaaaaccaacacaaggacacacgaaaaaaaaaaaggaagcgacgccaccgaggacgaaacaacaggcggccagcaacagccaaggagagagcaggagagcaagggagcgacagaagcgggacgcgagggccagaagcacagagcaccgccccagcccccccgcccaggccccgaccagggccagcgagaccaaaaccaccggaaagaggccgcacccaaaccagggacagagccaaggagaaaacaaagaggccagacaaggggacgaggggggcacgcggcaagagaggcgggcccggggggggcgcagaggcagaggaagagaggccacaacggccaaaccaaagaaagagagcgcccgggcagccaaacaggacacgcacaccccgagacacagcggacaaggaaaagagggaggaaggaaaaaagccagagggaggagggggaggggacagcacccaaagacaggaccaagaccaggaacacacgggggcaagcacagaccgcaaaacaagacaggaagaagaaggagggacgaaggaagaaggggcgaggagggggcgaagaagagagcacaagagaagcaaaaaggcaacacaagcaacacaaaaaaaaaaaaaaaaggccaaggaaggaaaaggcaagacggaccaagcagcaagccggacaggaggccaggacagggggacagaggggcaacacaggcaccgagcgccagacaaacggaacagggcggaaaggaggcccccccccacccccaaccccggcaaaaccacaggggggcagaaagaagagagagaggacagggccaagggaaaaggcccccaaagcaccagaaacaagcgggcaaagggggaagagcaagggggggcacaagacagccaaggaggggggcagggaagccgaagacaaggggcaacaagggccgcaggaaggccccggaaggggacaaaccgagagagacgggacgggccccaacagcagggcaccagggccgaggaaaaggcagcgcaaaaagagacgcgggcccccccagggagacaacaccggcccacacggaggaacaggacggacaccggaaggggaagaaaagccaacccaacggccacaaggaggcagggcaagccaacagagcacaaaaaaaaaaacagcccaaggcacaggacgcaccggggaaaaacgagaacaaaaagcggccaccacacagacaaggcaaggcagccaaaaacgaggaaaagccaagaaaagaaagggaaaaccgcccccagggcccaccccagcccgagcaggaagagcagaggccgacccagaggaagaccgcccagggaccgaaaggagggcagcagcagcgcgggggaaagccaccggggagaggacgggccgggggagagacaccgccagggacccggggcagagccaccgcaaacacgaagcaggacccgcaaagcgggaggcacgaacccgagaagcagggaggccagaccgcgagcacaccaagccaaggcagagccgggacaaagcaggaagcaacgacagaagccagcacccaaggcccgcgcgggaaagccagcgggccgggagccgcgagcccaaggaggccccccaccccaccaccccaagaaaacacccaaaacaaaacaaggacacacccccaggcccaagaaacagccccccccaaccacaggcaagaccaaacagccgcggaacacccgacaggaggccaacacccaagaagcccagcacacgagaaaggaaaaagnnnnnnnnnnnnnnnnnnnnnnnnnnnnnnnnnnnnnnnnnnnnnnnnnnnnnnnnnnnnnnnnnnnnnnnnnnnnnnnnnnnnnnnnnnnnnnnnnnnnnnnnnnnnnnnnnnnnnnnnnnnnnnccccccccccccccccccccagggacacacccggccccaaagcagaggacaacgcgagcgggaccccgacgaaaaccaccaaagcacacgcccaaagccaacaccgcagcaaacaaagcgaagccagagcccacaccaaagcaacagccagcgagccagcaaaagcgcccacggggagccgcgccccagagaccaaagaccggggcaagggaaggaggaggacccaggacacgccaggacgcaggggggcgcacaaacaaggcaggaagggccaccaagcgaagcaagccagggcagccaccaagaggccggggcgagcggcggcaaaacacaccaggcaggaagcgcaccaccgacagcacgggccgcagaccaccgcacaggggagaacgggcgccagacggaggacagggcccagagccccgggccggcccggggccgagcccaggccgcccaggcccacccggcaagcgccgccagcagcaccccaggcacgcccacaagcacgcgcggcagcgaccagcgaagacaaacagggccccgcaacacggcgccaagaggcaaccggagagacagggaagcacagacgcaaaccccacaaaagaccacacacccagcgagcacaaa

SEQ ID NO: 731 - RNA, 3568 nt, Mus musculus
ggcccccaaccgccgcccggagaccagagcgcccgcgcgagcacccgacaggcgagaagagccccaaagccccccgcgccacaagccgggcccaagagaggcacgcgccgggcccccccccgcgcccccccacccggacagaaccaccaaagcagcaagcagcaagagcgagagaccagacggccggcaccacaggagccccgcccgcaccgcccggcccagcccccacagcggggaaagggagccaggccgcaggaaaaaggcccggggggagggcagcagcgggagaggcaggcagggccgggagcccgggccccaaggcacccggcggggaggggggcacaacagggcgggggaggccagagacgggggggcgaccgccacccacacgagagaaagagagaaggacccaagacaggagcaccaggcaagcggcaagcagcaagccccggcacagccgcccagcccgcccggcgggggaagcacgcgcaccagcccaccgggcgggaaggaaccagccccacacccaagagcgaccccccccaaaaaccccccacccccgaaccaagagaccaggcggccccacagaccacgccgccccgaggcggaaaaggcacacaccgccagggaccacaggaaccggccgcccaggcccgacgaaaagggaacgcacaacagacagcacagagccacaggagaaacagcacgaggaggcgaacagggcgggccggcccaagcaacgacaaagaaggagacagaacacaggccaagagagggacaaaaggaggccaggcggaaaacccggggaccaggagaacaacaaaagacccagacaggccaaacaacgaaaaaccacagaccacagaccaaccacagagaaggcccggaaagaggcacagggcaggcggcgccaggccaggacggcagcccccccagggcgaggccaggccgcgcacggcacggaacacgcacggacgcgaaccgcccggggagcacacagggcgggccggagcccgccagagcacacaaggacaagcaacccgcggggcgaaaagagggaccgagaagaaccaggccagaggaaacccagaaaaaagcaaacgaaggcacagcgacagcaggaaggagagaaggaggcaggaaaaacaacaacaacaaaaaaaaaacaaaacaaaacaaaacaaaaaaaacaacccaaacacgcacacaaagagggcagaaccagcaaggacagaacccccccaaaacacacccagcagcagacagcagcaggcagcacacacgcacacacccgcacagaacggcacacaaacacagaacaggaacacgccgaccacacaccacacacacacaacacacacacaaaaaaaaaaacaacgaaaggagagcagccgaggccgccgggccccagaggaagagaggggcagacccgcaccggaggccgagccacaggcggcggggacgaacagggccccggcaagagcagcaaggcaaccacgaaccaccccagccacaacagcacggggggggggggggggcacgcgcggcgcagccacacacgccaggaggggcacagaggccagaagagagcacggaccccggaacgaggacaggggagagccgaaggagcgcaagagcgagccaggcccccagaacaaaagcgcacaccaagagccacccgcacccaagacgcccccgcgggagcggagaacaaagcgagggagaagaccgacagagcgggccggaacgcaagagagcagacggccagaaccacagagacccccgccgcccccaaggcgggagaaggcagggcaccacgccggcggggcaaagagcacaaccgaaaaacacacccaaggcagaaaaaaggagccaccagacccagcagaagaaggcaggccggagcgaaacaagcaagcagcaccccgcagcccagcggggacagcagcgcaccagcggggacagcagcgcaggacgggcggaaacgcacaggcaaaagacacacaagccggaagacaaagggagggggcacagcgggggagagaacaaaagcacgcagcccaaaaaagagaaagaacccagaggcgggaggcgcccaaacccaggccagaagggcaaacaaaaggaccgggagccaaggcagccgacagaaggggccagccaaagaacaacaaccaagagcgcaggaggcagcggccagggggacagcacagcaagggcggggggcgagcagcacaaacccaacagcacaaaagcaagggcacacaccacaagcccagacacggaccggaggagcgaggcagccgggcacaagacccgccaggaaaaaaaaaaaaagaggggggggccacaccaaccagcccggggagacagaaggaagcaaggcgaagggggcagccggcacaagaaccaggccaaccagggcaacaggagagaccgcccccaaacaagacagaccaaaaaacaacgagaccacaggggcgcccccgccccgagggacagcccggccgcccacgcccaggagcaagggaagacgagcccacccagagggggcccacaccaacgggcccaacagccaggcaagcgccagccccccagacggaaggagcgcagcgccagcgagggaggagggggaagagcccgcccaccccccccgccccgccccccacgcacccaggccccccagggaaccagaccacagcaaaagaggcaaggagacacagcccacagccaccggaccccaggccaaggccaccaacaccggggaagacccggcgggggggagcgggggacaacccccagaggaagaaaaaaagcccaggcggggggagcgaggagccagacgggccgcgcacaccgaacagccggacccagcccagaggaagggaacgaaaggagcgccccacacccacggccccccgccccacccgagagccaagcggcccgcagccgggaaccgagagcgggaggggggagaacagcgacgcccgacgaaagaaccccgaggggcacaacaagaggcagccagcgcaaagacgcccagcccggggaccgagccaacgggaagcaaacgcaccacaggacgggccaaaacagaaagagggagcgacaccgcacggcccaacgggcaggggcagaccagaagccaagacgagacaaccaaaccaccagagggaaggagagaacccaccccacagagcgaccgaccccggagcaccacgacggacccagggcacgggaacacaaaaaaaaaagaaacggggcccaaagaagcagagggccagaaggaggcacacacgccaccagcacggggaggcagaggcaggaggacagcggaggcaagacagcgagagccaggaagccagagcacaccaagaccacccaaaaaacaacagagaaaggaaaaaagaaggggagagaggaaggaaaggagccaggcaggagggcagcgaacccagcaccagaggcaggaggccagcccgaacaagaggaaggcaggccaaacagaaaggcgaagggagagggccaggggaagaggacggcagaagcagaagccgaacaaacccac

SEQ ID NO: 732 - RNA, 344 nt, Mus musculus
agggacgaacccaaagagggacaagagacacagcgaggccgagcaccccagcccaacaacacaaggaaaggcaagaaaaggaggagaaagccagacacagagagagagagacggcagagaggggaggacaccgagaaccacagaccacaaaagaaaaaacgaaaaaaaacggacgccaaaaaaaaaaacggcaaaaaccaggccccacgggcagacaggacaaagcccagacggcggaagccagcgaaggaaggacaggaaccgacccgcccaccccagcccgacgcccggcagcgacaagccagcgccgcccacacaaaaaaaaaaaaaagaaagagaggggc

SEQ ID NO: 733 - RNA, 4219 nt, Mus musculus
gaccgaagcaccccacccaacccgaaaacccaaaaaacacagagcaccaagggagaggggaacccacggcgcagggcccagcggggcagagacaccgccacagaaaaaggcacacaaaacggccagccaagaaacacaagcaagaccccaaaaaaaaaaagaaaacaaaaaaaaaccagccccacacccaacaaagcaaaaccagaggaaacaaaagcgcagaggggaaaacaagggcggggaaaacaaagaaaagggggaaaacaacaggcagagcaagaaaacaaagcaaggggaaaaacaacaggcagagcgggagaaggaggcagaagcagcaccaggcagccgccgggagacgggcaacccagggcgagcaccgccccagacaagaccagccaacgcagaggaaacgcaaacggccggcagggggaaaaaccaaccaagacacgaggaaagaaacaggccccccagccagcgaaaaaaaccacaagcgcaaaccagaaaaaggggagcggaagggcaagagcagccgaccccggaaacccaacgggggagaccagcggagaggccccaaccccccgccaccaaagccccaggacgcaagacaggaaaccaaccgccgaggccccaaccaaaggaccccgcaccgaggcagaaagcacacagggggggggccgccagccgcacggccacacaacgcacacaacaggaagcacggacccgagacaggcgggacaaacacaaacaagcgcccacccggagaggcggagccccgggagggagggcagcaaccccaccagcacagggagccaacagcccgggccagagccgcccgaacaagggggggaaggaaagaaggggaggacggagcagaaaaccgggggggagggcaacaacagggaagaaccccaaacgcccccaccacaacaggacagccagggccaacagcaggccacaagggaaccaacccaacagaagaagaggaagagagaagcacagaagagcaaccagagaccaccggccaaagagagcaggaagaccgaggagagcaccacgagcagggccgcggacaccccaagccgagagcacaccagcacaaaaaaagaaaaaaaaaagacggcaggaggacagcgcaacagcacagaagcaaggcaggaggagcggacccaggcaaccggacaaacagcaaaaccgagcaaaaacacacacacacagacaacaacaacaacgggccagaaagaggcagggaaaaggaacgcgagccgaaaccggcgacccagaacccacaagggaaggaaagaacgagcaaaagcccgaccccacagaagggcaagcacacagcacacacaccacaacacaggacagaagggggcacaaaaagaaaaaaaaaaagaaaaacagaaacagccgggcggggggcacgccaacccagcacgggaggcagaggcaggcggacgaggaggccagccggcacaaaggagccaggacaccagggcacagagaaacccgccaaaaaaaccaaaccaaaaaaaaaaccaaaaaaacagaaacccgcggccaagggcaaccgaaagggaccccaaagaaggcagacgcggacgaggggcgggaacccaggcccaccagagcagcgcccaaaaaaaaagaagagaaggaggaaaggggcaaaacccaagcagagagagaagcaagaacagagagagcaagacagagaaaagcaaaagagcgggaggaacccaagaaagaggccgcaggcagggacccaagccagccccagaacagggcaaggaggccaggagagccgaacagagccagaggcagagacggaggccccggaccacggggggcaagagacacccgccgaaggagagcacgacgaagagacacagccccggaccacagcacacacagcaccccacacacacacacacaacaacaggggcaaaaaaacaaaaacaagcagagaagaagccccgaaaaaagagccccaagacccacaaggcccggaaaggaaaccaccccaggacaggaggaagagggccagacacagaacgacacgacacaagcagagcacaccaagagcagcccgcgccaggcccacacaggcaaacaaaggacacggcaacccggcacaggagggcacagaggaagccgacagccgaaagcccagaacagcccaaggacaacagggcaacaacaaaccgcacccacggagaacgcaacagggcgcaagggggacagggaggaagaaagagaggcaaggacaagcaaaacagaaaaacccacaaggacaccagaaaacgaaaccacaaaccaaaagagaagaacaagacgaacaggacaaaagcgagagcgggaaggagggcgcgcaggaggcggcgcgccaccccagcgcgggggagagacaaaaccgaaccgggcacaagacacaggcccagacaagcaaaaagagagaaaacaaaacaaaaacaaaaaagaaacagaggccaaggcagggcagacagacagacagaagacagacagaaagaaagaaaaaaaaaagaaagaaagaaagaaagaaagaaagaaagaaagaaagaaagaaagaaagggcaggaaaaacaggcgaggaaagacaggggggggccgaggccagcaccagagaccaagggcacggaccccggagcggacacaggcgagcgagcgcccaacaggaccgggaacaaaccagacgcccggaaagcaggaagcaccagcggaccagcccagaccaaaaaacccagaagccaagagccaggggccaagaagcaaccacggccaagccagacaccaccacaaagcaagggccgaaacaaaagcacacgccggcacgggacgcacaccggacccagaccggggagaaaagacaggaggagccgaacaaaacacagcacagggaaaacaaggccagaccaagcacagagaccgcccaaaagacgaaaaaaaaaaaaaaaaaaagcagaagcagaaacagaaaaagggagggagcacacacacacacacacacacacacacacacaaaaaaaaaacacccgacagagacgcgcaggagggagcaaaccacccccagcagaagaaaacacagcacggaagaacagggaaggggcgaggacgagagccagagggaccccagaaccacaaaaaccagacagagagggccacaggcagagggggaggccaaggcagagagggccacaggcagagggggggccacaggcagagggggccacaggcagagggggaggccaaggaagagagagccacaggcagagggggccacaggcagagggggggccacaggcagagggggaggccacaggcagagggcagccacgccggcagaccaggcgggaggagcagaggacccagggacaagcggcaccagacgccaaaccggggccaggcaaggagagacccgcacaaaaggcagaggaaagaaagacacagaaacaacccagcccacagagcacaacagacgcaacaaccacaacagcaaacacacacaacaaacagacaaacacagagaaaaaacacaaccaacacagcaaacacacacaacaaacacagagagaaaagcaggaaaaagagagagaggccggacagcagcacacgcggaccagggggaggcaggacaaggacacagagaaccggcaccaccccacacacaggaagaaaaagggaaaacagaggcgggaccacagcaggagcagcgacgaaaaccccgaacggacaggaagaaaacagaaagaagaaagggacaaccaaggacaggaaaacacgcaagaacgagaaacaggccaccaccaaagaagagaccagaagagaggaccaaacccgcggcacggaaaaacacggaagagacaaaggaggcgaaaaacgggggaagcaagggacccgacagaggaggccagccggacacacgaaagccgccaaaaaaaagaaccagagcaagcaaagagggacccaccacgccgccaccagcaccagccccagcccaccccaaggccaaaaccacccccagcccccaaggcggggacaggggagccaacgggcagcaggaagccgcggagagggaacccccacgcagacagccgagggaacagagaggagggagagaggaaaccagagcgaagagacaacgcaaggaaacgaaaacacagcaaggaaagacacacaccgcagggacaggagcgggccaccg

SEQ ID NO: 734 - RNA, 305 nt, Mus musculus
ggaacgaccgcgagccacccaggcccagacgaaaaaggagcgcgggaggaggcaagcacgggggggcgagaggcaggcccagagccaggcggcccaggagacgcccgacgcgccagcaagaaggagccacaacaggaccgcacagagggagagcgaagcgaaagcgaaagaccccgagcccaaaaaccaggcgcaaaggccaggaaggcggcacacccgaggagccagacccaacagcccggccaggcaggaccggcaaaaaaccacgcacaagggacccaacaggggcggcagaaaccagcaca

SEQ ID NO: 735 - RNA, 2368 nt, Mus musculus
cagaaagccagaggggaaaggcgcgcacggaagaacccccagcgagagcaacagagacaacagaaaaaagcggagcaggcaaacaagcaacagcgagacacagccgggagccccccgacgccggaaccaccgagaccaggcggccgaacacagggaccaccgcccgcccccgcgcggaaaaagggggccacgcccagcaaaaacaaaagcagaagaaacacacaccagcccccaacccagccccccacccccaaacagccccaaacacaggggcgccgcgcaagggggaaaaacccagggcccacgggaagcaagaaccgccacaaagcgcacccgagccacaggcccgaacccaagggcccaacgggacaaagccacagcgagaacacgggaaaggcaggggccagaacccagaaaggggggggaaggaggagaggagcagccgggcaagccccacccaccaaaaaagagaaaggggaggggggcaagggagggcagagaaaagacaagaaaccagaacgacgaaaacagaccccccccaaacaacacacgagaacaacccaggaacagcacgcaaggcaaaagaacacacaggaaggggaaggcacggaggaaagagacggggagaggaaggggacgcggaaccagagagcccagaaagaggagaggaaccaggcgcaacagccacacggcgagaacagccacacagggaggcggggcagaggcccggcggagccagagggaaacggcagacggacgaccgcacgggccgcacagggcaccaacaggaaagagaaacaggcgcgccacccagggcggaccccccgagcccaggagagagccacacgcgaccacaggaagcacaagccgggcacccaaacggcaagaacgggaggcagccagcgcagggcagacggggaggcccgcagcagggcccgacccaggagcggcgcaggggacaccacagcaaaccagccgggacccggccccaggagcagccgcacagggcgcaaacaacagcaggaaaaaacccaaacaaaaaaaaaaaaaaaaagggggcggagagagagcagcagaagaggcgcccagaggaccagggccaagccagcaccacaagcagccacaacacgaccccagcccaaggaccggccccagggacacagacaagcagagcaaaacaccaggcacaaaaaacaagaaaaaaaaaaaaaaacaagaacaaacaaaaaaaaaaaaaaaggccgagagggagacaagggacagaggcaggcagaccggaggaggccagccggcacagaagaggagccaggacagccagggcacacagagaaacccgccaaaaaaaaaaaaaaaaaaaaaaaacaaaaaaaaaaaaaaggacgaaggaggcacagagaacaagagagagcgcagagccagcacaagaccagcaggaaaaaaacaaacagaaggccggcgggcgaagaaccagggccagccaaaaggacccccccaagaaggccagcagaaaaccagccagagccccaggaaagccggagacgggggagacggaaggggcaggccaaacagggccggaaaccgaggcaggaacagcgagccccagcccgaccgagcaccaggcacaccccacccggacccgccaggagacacaacaccccagcgaaacggacgacccagaagagcaacgcagcccaggcaggaaggacaagggagaaccagcggggggcaaccccaaaccagcacggaggcagaggcagcggaccgaggaggccacccgccccaaacaagcaggacagccggggcacagagaccgcggaaaaaaaaaaaaaaaaaagagaaaaaaaagacaccaaaccaacccacagagcccagacgaaagcgcgagacggcaaggacagaagaaaagcaacgccggcacggacacgcaagaacagagccaaccaggaaggacgcgaagcagcccacccagaaggcagcgacgccaagcggaacgagggaagcgagcaacgcaaaccgggccgcaccaaggaccaacgggggacagggcaggggcacccaaacaggaaagaaagggagaggcccggcccggggggggagagccgcacgcacggcagcggggcccaggcaccgagcccgaggggagaagcagccacggagaacacaggaagcaaggagaaaggcacaggagccgaaccagaaaaaaggggacggaaaaccagagggcgaaaaacacgagccacggggggggcgagacagggccggagcccggcgccggaaccaccgagaccaggcggcccgaaccagaaacggccgcccgcccccgaggcgggaaaaggcggcgccaccacgcccggcgagccacaccccc

SEQ ID NO: 736 - RNA, 869 nt, Mus musculus
gaggagaaggaggagaaggaaggaggagaaggaaggaggagaaggaaggaggagaagaaggaggagaaggaaggaggagaaggaggaggagaaggaaggaggagaagaagaaggaggagaaggaggagaaggaggagaaggaggagaaggaaggaggagaaggaaggaggagaagaaggaggagggaaggaggaggaggaggaggagaagaagaagaagaagaagaagaagaagaagaagaagaagaagaagaagccgcgccagcccgggggccaaagcacaccagcccagcaccaggaggcaggggcagaggcaggggaccgagcgaggccagcggaacagaacaagcaggacagccagggacaacagaaacccgccaaaacaaaacaaaacaaaacaagcccgagaaggccagacaggcagcccgcccaggaagaaagaaggggggagggaaaggacgcaggggaggaccgaggaaccgaccagagaagagccaggcaggagcgccaccaggcaggaagaccagccaaaaacccaggccgaaaaaccgcccaaaaacaagggccaggcaagagagcggccagcagaagagcacggcacccccagaggcgagcaaccggcaaccacaggggacaaccacgaagggaccaagcccccgcgagccccgcagcaggcaacagacaaaacagacaaacaaaaaaaaaacaaaaaagaaaggcggcaagcaagagaaaaaaccaggacccgagcgcaacagggcacaaacccaaaacaacacaaaacacaaaaacaaaaaaaaaagagcccaggcagcgggggagacggagggggagaagccagagcagagaacaaaaaccagaggcccaagc

SEQ ID NO: 737 - RNA, 5255 nt, Mus musculus
ccacacccagaggagaaggggaaggggaggggaaagaaggggaggaggcgccaggagggggcaggaggggaaaaagaaaaaaaaaaaaagaaaccacgggggaagagccagcagagaaggcgaagcagaggaccggaggccagcacccccaggaggcaccacaccacaacccaacccaggggaacagacgccaccacggaggcaccaggagacaacacaaaacaggaaacaccacacaaaaaaaaagaaaaaaaaaagaaacagaaaagaaaaaaaacccaagaaacacagcaagaggaaaagacaagaaaacaagcgcaaggccagcgcgagcccgcaggcccggaggagcacgaggggaggaaaacccaccgcggggccacaagccgggcagggcaaagccgcaaaccccccggagagcggaggaggcagcagaacaccaccaaggccgcacagaaaagagaggagaacgcagagaggcgagagcccccgacgggggcgggagcgagacccaggagaggggaagggggcgccagcaaaccccgcaaacagagaagacagaccccggcccagccccagacccacaggcagaccggcgcccggagcaggccaggcccaccagcggaggcccacacgggcaggaacgaggcaccggggccgaggacaaaagaggaaaacaccagaagacacccaaccggaaccaggagccccaaccacggagcgacggacaggggccaaccacagaaccgccccacaaccagcaccgaccgaagacccagaacccccgaaccccagaacccccgaagagagagaccagcaaccagcacccaaaacaaccaagccaagacacgccacgcggcggcgccgggaaaagacgagccagcgagcggggaacgaggcagaacacgccaaaaacaagaagggacagcacacggcgcaccggacagacgcggcaagaagcagccggaccggccccagaccccgagaagccccacgaacagcaccaccgaagccagaaacagcccccccgaaagcgaaagaaagcgggagcaaccccgcagacaaaagcgccaggcccacagccaggaaaacggcagacccaacagagcgacaaaacagaccaccccaacagcgcccacaaaagaggaagaagcacgaggaggacagggcgaggccagcgcaagaccacaaacgggcaagcagagcaacaacgaggaaacaacgcaggaggcgcgccgggcaggaaacggcaaggaacacgaggaggagaagccaaacacaaggcaaggacacagggaaggaaggggaagggaaggaggcgagaggagaggaccaaggaccagcccacacaccccccaccccgacagcccggacagccacaccgagcacagccgaaaaggaggagggggggggggagagacaagggaagaaagcccaaagggcgccgggccggaaaaaacagagccagggaaggaaaaagggaacagagcacagccaaaagcacaggaggccggacaaaaggggcaggagacggcgcgacgcccgcagagaggaaggcgggcccgcgccacagaaaaacaggccaggcgacagagcgaaaagacagcccccgagagcagagagacagggggaagcagaagggcaggggggccggcgacagaaaaacccgagaaaacaggaaaagccacaaggggcagacgcagaacggaccaaacagcacggcgccacgggcggggggcggggaaagcagcccacggccccaaaaccagggaagcaaaagcagaggcaccaaccggaggagaagagccgggagcaggcgccagggaaaacaacgagaggcacacggaacagaagccaaaacccaagaccaaacaacaaggcagagaaggcacggcgcgccagaagaccaggacggcacagcacccacaggaggcggaaacacgaacccagcagaagacgacacccccgacgagggcaccaggcagacaggaacacacacacacacacacacacacacacacacacacacacggcgcgcgcgcgcaagcaagcaaaaagcaacacaaaaaaaaaaaaaaaaaaccagaaaaggaaggaggcggcagagcacggggggggggggggcggggggcgggcaggggagacgcagaggacaaagagacagccgccacaggggaccagaaaaacccagggcacgcgggacaccgccaacgcggccagaaaacaaaagcacagggggacgaagagcggaggcagaccccggaacggagacagacagggaggccagggagcgggaagaaccaggcggaagagcagccggccaacacgagccaccccagccacgaaaacaaagcaggcaggggcacccaacacccggaagacgcccggacaccagcaagccaaagaacccccccaaaccggcagagggacaagaaccggaaaaacaaagagcacggggaaaggccagcacacgaaacaggacaagggaaagggaaaaagaggaagagagaacaaagagcaagaaagaccagaaccgccggaaagaagcaaaaaagagcgagcaagaaaaaccaaccagcaaagccaaaggcgggcccaggccacaagaaaacaaggggaccacagagagccggggaaaagagcgccgcagaggagccaggcagcacagcaccggagaggccccaaccaccaacccaaccagaggaggagcccgaaccgagggcacaaagaagccggggacaggcagggacacacgaaaaacccagcaaaaaaaaaaaaaccaagaccccagaaagaacgccgccgccaccaccaccaccaccaccaccaacaacaaccaagacaaaagaacaaaacacccaaggaccaggccagagaaagacgaagagaacacaaggcgcgcaaagaccaccgaacaggaagcacaagcaccaaagacagcgaaggagagcacaaggcaaaaacaacgcggagacaagcaaagaaaaagagacggggggcagcagcagacgagcagaaccacggaaacacacccaaagaacaagacagggaggccacgcgacacggcagcacggccggaccgagaccaggaggccagaagaggagcggacccagggacaaagaacaggaagccacccggggcgggaacgaaccaaggcaggagagcggcaaggcaacccccgaacaccgcagcgacacaaccacaaagcggcacaccaacagaagacacccacagcgggcagccccccacaggcacagcgccaaccaacagaaacccacccagccagagggaccccacccacccagccccaaaccaaccaggaggcaccaggggaaaagagggcccaacagccaagaccacgaaacacaccaaacggagacagggggccccaaccaaaggcaaagcggacacgaaacaccaaccagcccgagaacagacacaccgcggcgggaaaaagggcaccaagccaggaaggcgaaccaaaccccacccagccgagagcggagacggggacaaaaacaccggcccacggaagacaagaacagcagagagaagcaggcaaaacgcaacaagccacccgccggcaccaagagaccgcggggcacaaccggggcagacgacaccagagcagagaagagcacagcaggacaggccagcagcccacacgccaacccgaacagaaaacagaaggggcaaacgaagccagcagccaacaggccgcaaccaaggaccggaagacaaggaaggacaaaacgacccgaaagccagaaagaccccgacccacccacagacagggggaagacaggaaacagcacccccccccccccccccacacacacacacacacaaacgaaaaaaacaagccccaaggaagagaaccaaagaaaaacagagaagcaaggagaagacaagaaggaacagaaaaagagagccaacccccccacccccggccaccagcaaagccccaggcagccacggaccacagggacaacaccaagagccacagggacaccacagccccaagccacacacaagcaaccaggagccagccagagcggacagagcacagaggacgagccagcaagcagcccgacaagcaggccgcccaagaaccagccgccaggggagcacaagacgaggcacaacacagccgggcaaacagcgagaagcccccgaggcccaccggggagaaggggaaggcagagcaggggcaaggcacacagaccccacaacccacgcacaaggcaccaaaccagcacgcacaaaaaccaccacaccaagggcgaggccaagcaacgacacgacgggcacaagaccagcccagcaggaaaaacccaaacgagagagaagggacgaacgcaccccaccaaccgcagaacaacagaaaaaaacccaacaaagcacagggcaagccgaaaagcacgcaacaacaccagaaaccggcagccgaagaggcagcacaagggaggagaagcaacgacacaacagaacacgggaagagagccaggggaaacgcacaggaggcgagggcaggcaaagggaagcaagcaaagaaggaaagacccggcccacggggcacacccggagagggccagggcccaggaagagcacccacccagggaggacagaaggaaacaaccaaaaagcaacaggaagccgaagcgaccagacaccccagccccagaagaagcaaaaagagacgagagcaccagacaagcaagaaaacagcggaagaagagaacagcgagcgcgaaagagaagaccaggagccacggaagggacacccaacggaggccgcagcggcaggagcccaggccagcggaacgcaccccgccagaagggcgcgagcagcgcggagcacgccgaaggaagccccacccaaccagagaaccccaaaaaaaccccggccaccgaggacgggagcgaggcggggcccagggggggagacgggggcacccaggaaaagcgcaacaacagacaaagggcaaaaaagccaagcagagcaggaaaaaaggacaggcccacaccccccgccggacaggaagcaggacagaggaaggccagcgaccccaaaaggccaaaccggaagaagggaaaaaaaaccccacaaaggcggggaggaaccacaagagagagaaacggaacacccagagaccccacccggccagcaaggccccccaccgcccacccccacacccccacacacacagaaggccgcgagacggaggccagccccaccaacaccccagcgacc

SEQ ID NO: 738 - RNA, 3858 nt, Mus musculus
  misc_feature (1244)..(1343): n is a, c, g, or u
  misc_feature (2844)..(2943): n is a, c, g, or u
ccaaagacggccggcaccaggcagaggggacacaaccccaggagccaggggagcgcagcaaggcggcacaccaaaggggagcaccaggggcgcagccaccaagcaggacaaggaaggaaaagaagagccgggaggggccgccagcagcaggaagcgcacgggggacggagccgagaggaaggaaaagagcgagcgagcagcaggggccgccagcagcagcaagcgcacagcacaacggagcaaagggagagggcacagaagacggacccggacacgggaagagaaaggagaacagaaaaccagaaaaaaccgccggccgagagacaccacggaagggacgaagaggaacaaaagggaagagcgcaaagacaaaacaaaaggagaagaagaaaaaacgggaggggagggcagccgccccgagaagcaaacagaaaaggacgaaacagcgcaagacaaaagaagagcagggcaccacggcggcaggaccccgagaccggaggaaagccgcgaacaggaaagaggggccaagcaacgagcccagcgcggcgaaaagacccaaaagcccagaggacccgaagaggcaggaagcgaagcggaagacaagccaaacaagagagacaaaaacaaaaggaaagagcaaaaagaagggaaaaacaagcagagcacaaagagacaacgagcgcccaggcacacaaccagcggaagggaagcaaaaccagagcacgggcagcccgaccaccggaacggggaaggccaaaaaggcggaagaggcaccagagaacagcaaagacagccagagcccccagacacggcccgggccaggaaccacgaaaggagcacaggagacaccgccccacccaccccaccccaacccgccccccagggacgagccaacaacaagcggcccacagagacggcaaacgcgcaacgcgacggggaggcgagcagagacgcgccacggcggcggggggccaaagaacgccaggagggaccagcggcacagaggaaaggaccagcccggcgacacgagggcggacccaggcccagaagaaaccagagcggaagaagcagcggagcggcgccaacgcacggagagggcgaaaggcagcaggagaggcaccaggccccacccagacgaggagggccccagcccccccgcgcccagccggccacacaaaccaggaggcacaaggacgcaaaggggaggcgagccagccaagcagcccccacccaggaaagaaggnnnnnnnnnnnnnnnnnnnnnnnnnnnnnnnnnnnnnnnnnnnnnnnnnnnnnnnnnnnnnnnnnnnnnnnnnnnnnnnnnnnnnnnnnnnnnnnnnnnngaggagggggaaggagaaaccaaaaaaaagagggggaaacacggacaacagaacaagagagagcacgcaccgaaagcccacaggggaaagaaaggccagaggacacagggaggacgagcacacgccagagaggcgaaaggagaaagccaccaagggcccccgagagcccacgccccgcaaacccagagagcccagagcacagccgggccagccaggaaccagggacggcgggagagcgacacaagccccagcccggggcgggagaaccggaaggcggggcggcgacccccagcagaggacgcgggaggagcgccccggggcgccggaccggccggggaagggcacgaaaagacccgagggccgccacggcgggagggggagcaggaagcaaggagagcaaccgaggccacccggcagcacaccacaagcagaagacaagaacaaaaaaggggagggaagagaggggccgggggggggggggggggggaagagaagaagaagaaggaaggcgcgagagagcaggcgggcccggaacgcagcagcccaaggagggcggagcccggccaggaaaggagccaagcagacccgaccagcacccgggcacacagcacccagcaaaagcagggagggaagggaggcggcggaggcgaccgacagggggagagccccgggggggggggggcgcggcacagaagcagcgagcggaacagaaggccagaaagacagagacacaaggcaagaccagaagccagccgggcaagcgaggaacagcgcacggaaaggagcaaggcaaaccaaacagacaagacggagaggaaacacagcccagccaaaggggacaggaaaggaggcccagggcaccccaagcccagcccaacaggaagcagcagaaggggacacagaacaaggcacagagacagccaccacacaggggagccagccagccgggcccagggccggcggggaaaacaggcgaaagaaacacccaaaggacgagcaggagaggggggagaaggaaagaggaaagacccaggacaaagaacccaagaaaaaaaaggccggagggcaacaccaaacccggacaagacacacagcacagacacggccccaggaaccccacaagcggagacaccgggggcaccaggccgagccgccccccgggggggaaggcaaaggcagagcagacacagcgaggagggagccccacaaacccgaccgagccgacccagaggcccgccccaaacggcgcaaacggagcccaaagggaggaggcaggaacccagagccacaccaggcgcagggaaacagaaaagaaacaaaggccgggccccccaccccacacgggaggaggaaaaccaacggacaccagcccgaagcaggggagggacccgcacccgagaggacaggccgcccagcagagcaggacccacagagagacacccaaggcagcggcggccccacaggaagaaccacagaacacaggacaccgacagggacagcnnnnnnnnnnnnnnnnnnnnnnnnnnnnnnnnnnnnnnnnnnnnnnnnnnnnnnnnnnnnnnnnnnnnnnnnnnnnnnnnnnnnnnnnnnnnnnnnnnnnagccgcacgaggcagcaaaacaggaaaacgaagcgaaacggaagccagccagcgcaagcgaccccggggaccagccgagggccaaagaccaggcaaccgcccccgagggggagggggcaggccaacccggaccaggcgagcagacaaacagccgaacagagagccaccccccccccccgcgaccccggcccacgggcaaccaaggcaacccacgagccaaggagaggccaggaggaagggcccccccccccccaccacacaagacgaacggggcaaagagcccggaccgaaagagagggaagaaggacaaagccggagaagaaaggacagagcagagccagggacaccaagcccagaccacaaccgcaaggccccagcgagacagaggacggaaggacccgaccaaaaccggcacagaaagaccgaccacagccccccgcagagacgagccgacacgcccccacagagaccaccaggagaaagcgagccacccaccggcgaacaaaacacagagccaggacacgcgagcccacgagacaggccacgggcccagccacaaaaacacaccaggcccccagcgacaagaccaaagccaggggcgcgggaagcccaaagggagcaagggggagcaacgaaaagacagagacaccaccaagcagacaaccaccccgcccagaccaggagggggagaaggccagggccccggcacagaaacaggaagggggagaagcgccggccaggccagccaccaaaaaaagacacgcaagcccagacccccagagaggacaggcagagagggcacaggagaaaggcccacacccccaccgacaagcaagggaggcgggcagacacgaaaacagccaagggggcacgggccggggaggccaggcaggaaaccagaacaggaccaccacc

SEQ ID NO: 739 - RNA, 1732 nt, Mus musculus
aggggcggaggagaaagcgaaacgaagccacacacccacgaaaagcccacgggaaagagggggggcaaaaaaagcacagagccaacggagcgagacacggaaaagcgaaggggaaaaaaagagggcacagaaaccgacccaccgaacagaaagaaggcagccagggaggaacgcgacaacccgacccccacgcgagcacgaccaggaaagggaacagcgagacggaccagcagcacgaggaaaacagggaccagaccggacccggcagggcccgagcggcagcccgggaccaccagccgggcagaacacgaagaaaaccagcacaggaagaagaagcagagacgaacgagcgggaggcaaaccaccaaagaaaaaaaaggccaaagaaaggccgccggcccaaagcagagccgagagaaagagggcgagagagcggacggggggaccagagaaacaggaaaacgacgagcggccgcgcacggcaccgaggccgacacaagggagcgcagggcacagaaaggcagcagggaacccaacgaaaggcacagagagaaaggcaggaacggaaaggaacaacagcagcaaaaaaaaaaaaaagaagccgaaggaccacacaacaaaaaggaaaccggccgaaccagcagagaaaacgaaaaagcaaacacgaaaaaaaggccaaaaccccaaacacgaaaccggcgccgggacaaagcagcgcccccgggggggggggggcagggaaacaaaacaacccaccccagacgaggcagcgaggaaacaccaaagccgcacccgaaagaggcacagccgccaacggaccaggggccgagaacaggaccgcaccgcaagggagagcaacacaggaggaagcaagaagaccaaagagaagcccacagcggcgggaacccaacccgaggcaacacccagagaggggccgggacgaacacccccacgggccacaagaggcagacgcagggcggagccaagcaaggaaccggggaagaaccacgccaacccaagcaccgaaaacaccaaggaaacaaggaaaagaaagggcgaccaacagggccgaacccagcgagcgggcgagagacagggcagaaagcccgacggccgagacaaagagaaagaaaaggccacgacccacagagaccccgcccgcccagaggcgggaaaaggggcacaaaccagagcgaagaagagacacaaaaggaaaacaaaacgacaaaaaacaaccaaagaagagaaccaagaagcggaaaaaagaaaaaaacaagcaaaacacagcagaccacagaaaggagaaccaggagccaggaggggccggagagggggcaccaaaacacaaaaggagaaaccagaaacaagagagagagggaccgcaagagccgaagccggcagcgggacaggagccggccaagaggagaaaagaagaaaaaagaagaaaaacgaacgcagacaaagaaagacgagcaaaagaaagagaaaagcaagccgaggcacacagaaaacgagcacagaacaggaaccgaaaacccgagcccagacaacgaagaaggcgaggaggaagcgggaccacccccagaagaaaaaaaaaagaagaaaaggagaaaaagaccaagcacagccccaagaaagggcgcaggcagagccaaaaaggaccccagacccagagaggagcccagcaggccaaagggagccaccaccaggcaggacaccagggaagcagcca

SEQ ID NO: 740 - RNA, 13796 nt, Mus musculus
gcgagagggcggggggggacagcgagaggcagaccgcccggccacaacacagaagccaaaagagaagccccggaaggaaaggagcagcagcgggcggaaacagccaagcaccccgaaggacagaggggggcaacaggcggcgaggggcggagcgccaccgaaaaagagagaagaaaacgggagccaggccaagaaccaaaaggcaccaacccaggaccggacaggggggacccccgaaagaggaccagagagcaaacgcaaggccagagggggggcagggacacacaaggagaaaagcacacacacacacacacgccaagcaccagaaaacaaaacaaacaaacaaacaaacagaggaaggcaagggcgcccccagcaaccacggcaggcagcggaggagaccgccgccccccagcagaaggaggagacaacaaaagccccccaaggccagaggcgccacacaccacgaaccgacccccagggaaggggccggagccacccaaaaaaaacacagcgcagggggccacacccacccagcaccagaggcagaggaagacagacccaggggaagcagcggcaccaggagcccaggcagacaggaacaaggggaggccgccaaaacgccccccgcacaaaaaaaggccgcagccaaaccgcgccaccagcccagcacccagagacacccacacccaaggccaaaagcgccaacgcccggagcgagggcaggaagacacaggaccacccaccgccccccaaggaggagaaccagaccacccagggcccgccaagcaaagccccccccggaggggggggcacgcggcacagggaagacacgcgccacacagacaaagccacacaaagaccccccacacaagcaccccagagacgccacaaggccacacgagccaaacggcaaaccagccaaaccacaccaaaggcagacacacccaacaccaacggaacgaccgagcgaacccaaccacagggggagagagagagagggaggagaggaaaaggcagaggggaggaacccgacaaaaaacccagaaaggaccggggagggaggagcagaaacaggagaaggagagcgggggcccagcggacacaccagagaggcaacccaggagacagaacggcaagcaggacggaggaggagagaaaggcgcgagaaaccgaaagggaggccgaggcgacgcggcaccccaacaggcggacgcacaagaccccaacccaccaccccccccccgaaccgccccccccaacagaggaaaagaaaaaccagggaagcgcagggcacagagcccacagaacccgccacacgcgcaaagcacaccaggacaggcggacgaggcccggccgcaccacgaaggaaccacgggaccccgggaacgagcgcccgcagagaccaagggacgaggacccagcacccagcagagaggggaagagggaggggacaacaaagcccggaccgggccgagaggacgagcgcagcccaccagaaacagcacaaccacgacaaaacacccccagggaacaggggcaaaacaggagcaggccaaagcacgaccacacagccagagggccgagggcacacaggaggcggcccaggcagggaggggaaacaccaaagaacaacgccaacagagccccgccccgccagcaagagggaggcggggcgagaacgaccggagcaaacaggacgcagcccggccggaacaagagcgggcccagccgacaaggcgcagggcggcaggaaagagggaaggaaaaacaacacacaacgacagccaaccaaaaaagccaaggagagagccagacacaaacaaccagcaaaccacagaggcaacacagggagaaaaggccaccgccgcaggccaaggaaaacgagcgcgccagcacagggagaagacccagaaaggacgcccacacccgaacagaacgccgcacgggggaaccagcgagaccacccaggagacaccgaggacgaaaccgcaacacacccaacccaaagagcagagagaccagaacagcaaggccagagccgaaagcaacaagcaaggagaaaccccacccggccccacagagccagccacccgccagcagccacgagaaaagcacgaacaccccaaaggagccagcacaggccaggacccaagccaggacaccccccacacaaagagcagaaagaaccaaagagacggcccacccaaaggcgcagacccagagaaagagaggggacaggggaaggagagagagacagaagccacccgcaagacagggagaccacaacagggaccaacagcaagacagcgaagccccacgcacaaaagggagcaccaaacccagagccgagcaagaaaccagacagacaaccaggggcacgagccaggccaacaaaccccccgcgcgagcagagaccgggaggcaggcaggggcccaggcaaacagggcagcgcccaggacgccagacgcaaggccccccacaaagagccaaccagaccccacggagcccgaggccgggagcagaaaagagcaggggggccccaacaacagggccgaaacaggcaagagaaagagcagacaaaagaaaaccagaggccacaagaccagcagcaaacaaaaaggaagaaagaaccccgggagccccacacccaaggcaccaagcccagcaggcaacaacaacaacaaaaaaccaaaaaaaaaaaaaaaaaaaaaaaaagcaaaccaaaacacccaaacaaacaaaaaaaccaaacaacaacaacaaaaaaaaaacccacagaacagggggaaacaggcccagggaagacaaaccagaaaaaagccgaaaagaccacgcaaaagcagaaaaaaaaaaaaagaaggggggaaacaaacccagagacaagaaaaacggacaacccacaagggggggggggggggaacaagagaaagcccggacagccgcgaaagagccaaccgcacagagccacacccacgacaaaaaacccggagcgaaaaccccacccgaggaacgcaagacacaacaacccagacggggaagaaacgagagcccagggcgaagccagaaaggcgcgaccagcccaaggaaggcagccccccggcccagcccggggccagaggcccccagccggaagcaagcgcccaccaaaccccaacacacccaaagcgcccagggaaagcgccagccagccccaggcagaagccaagcaaggcgcccaaggggcaggaacagccccacgggaaccccaaggccgcagggcagaccaacaagggaaagcaccccagcccgacccacaccccagagccaaccggggaccccccaaaccaggacacaaccaggcaaaccagaggaaaaagccagaaggaagagggcccccggggagcggcagggggggacagccccaagggcaggggaggcccccggcccagaagagaggagggacccaggggaggagggaacagagcagccacaagcccagcccccggcccacaggcgggcgaggcggcgagagggacagcaggagcgagggcacaacaagaaggaccaggagggaaaccagccccccgcacccaccacgcacggcagagagcagaaaaggaccaaagacaacaacaaaaacccaaacaagcacgccgagacccacagagccacgccaggcagccggcgcccccccccccccacaccacccagcaccgacaaacaaagagcccgacaaaccgaggggggggagaaacagagagacagcaaaccacggcaagaaccccaaaggacaaaaaccagcggacgacccaagagggagacgaaagaggcgagcgcaaaagccgggaaaccgcgccgcagacgcaggagaccagcccggcccagcccgcacccaggaccagaccagcaaccaagcaacgaacacaacaaaacaaaacaaccacaacagccaccggagcagaaaagagaaacacaaccccagaaggaaacaaaagccggcgaacccaggaaggagacgccccacacagagagacgggcacaaacaggccagcgccggcaagaaagagggcacaggcacgcaccaagcgcagcgccacccaagcacaggggagcaggaacaagcagaacccacgccaacccacagaaccagcgccaaccccaaggcagagacccaccggcaaacaaggagcggagaagacacgagcagggcaaaaagcaccacacgccaccgcggacaccgagacaacgaagcccggaaacacgcaagcaccaccagaaagcaaacgcgcaaaggccacgcacccacagaccccgcgagcaaagacgacggaagccagcaccagaagacccggccgaagcacagcacagccagaaccacgacacgacaaagcaagcgcgacaccggcgaaaaaagaaaggaacgcacaccacaccgcaacaaacagaccaaaccgggcagaaaagcaccaagggccgccaccgagggaaacggacaagaacagcaaaaaacaagacccaagaagcccacccaggcagcaaagagagacacacgagaaaaaaaaacaaaaacaaaaacaaaaaccaacaagcgagacacaaaaaaagcagccaggggggggacacgccaacccagcaccgggaggcagaggcaggcagacgagcgaggccagcccgcacaaaggggccaggacgccaggggacacagagaaacccgccaaaaaaacaaaaaccaaaaaaaaaaaaaaaaaaaaaaaaaagcacaacagagaaaacccacgcaaaagggaaagagaaaaaacagagcaggcacggccccccagcgaaacgaacggggagcagaggcaaaccgagaaacgagggacgaaccaacgcccaggggacaaacccggaacagggcggaaaacgccccgccacgggggacaccaccgggcagaacggccgagaaaaagggagaaacgaacgagcaacacgcaccccgccgaggaggaacaaggacccgcccagcccgccgccagccccccaccagaggacgaaccaaacggagcaaaaaaacccacgaggcacagaagcaagcaacaaggaacaaaaggagagcgagcagagcccgccccagcgcacccccagagcaacccacacacgccaccccggggggagcacagagccaccgcagccacccgcacccgaaacccacacagcccaagcgcaagagggcaggggaagaaggcaagagaccaacccgcagcagccacagagccaggaccacggcgccagacagggaccagcaagcaacacgcccacccgaagacagggaaacccccccaccccccacacccccagaagacacaggaaaccacaaaggagacaaagaaaccaaacacaaaacaaaacaacggagagaacacagaagccagcgcggcagaccacggccgggcagaccccacgccgagacagcagcaggcaggcagccacacgccaggaacacagagaccccagaccgcgcaccgaggcgagggaggcggcccccggacgcggggagcaaggcagagcccccccccccgagggcaccaggaacacaagcaacaaccgacagcagcagagggaccgcaggcagcaaagcgcagggaaaccggccagcaaagagagaagccacagcgaagccgagaagacaacgcggagaaggggaacgcccccgcccaccaaaccagggcaggacagaaccaaggcaaagcccgccgaaccacaagggcacagcacagccacaacaggggcgcccgccgcccagccccgcgggcacagcagccaacccaagaccgagaaccgggcaacgggcacaccacagggaccaaagccccaagccaagaccacacaccagaaagacaccagcgagcagggcccaccagccagccacacagagaccaggcccaggagccgagcagagccaggccaaggccgggacagaggggaaaagcgggcgaggacaagacaaagccacccccggccccccaaccccccgcacagcagacccaaagcaaggacaacaccgccgcacaggcccaggggcagagacaagacaaccaggaagccagcagacaccggaaccgccgcccaagccccgcagagcgggaggggaagggaggggaaggccagcagcaacggggggccaccagaaggaaggggcagagaaagggccgaacaggcagaggacaaaaaccagaagagagggaggagaagccccagaacaccacagaagacacagcagagaacggacacacaggaacaggcacacgaaacggaaaaaaccccaaccccggaaagcagcaagggcgacccagaaggagaaacgagccaggagggaggcaggaaggacgaacccgcacccaggcaggacagacagccaaggccagcccaagaacgaaaaggaagcagagcgaggcgaacggcccaaacacaggagccaaaaccaggcaggggcggagacacgccacaggcgcacacgacagaccggaagacccgacccagcacccacggccagccacggccccacggccagccagccagcccagcccagccccaccacagaaggaaccccaagcaagccagacccacacggaacagcaccaaaggaccacagagccccccagggcgaggacgaggcaggagcgccaaccgccagaccacacagccacagacccgccgcacacaaaaaccagcaccagcagagaccaaccacccgggcgagccgcgaagccaagccccaaaccgagcaaacaaaaggaagcaccaggcacagacccccacccaccaccaccacgccaggggagcaagaccagagcaggacagaaggcagggcagagcccagggggccaaccggggggaggagagaggagcgccgccccacaggaaggcgaggacagcagggcacagaggacaagcagcccggaagcaccaagcagggaggcacaagccgcaggggaaaccacacacaccaacggaaaagaccaggaagcaagagggcccccagcacaccagaaagggggcgggacaacaaccaaaaaacgccagaaacacgggaaaaagcaggcccaagggcccacaaagaacaaaaagggggcaaaagccgaggagccaccccacccggaggggggggggggggggagggggggggggggggagagagagagagagagagagagagagagagagagagagggccagaggcccgccacgccaacaccacccccccaaagcgaaggcacagagaaaggcgcagacacgcaggaccaggaacaacagagcccccaaggcagcccccaccaccaccaccaaaagacaacaccccgaacacagggcacccaccgcaggagccagcgcccagcaagaagcacgggaccacccgaagacccagaacagagaaaggagaagggaaccacacccaccaggggcgccagacacagcaccccgcccacccaaaccccccaaaccaagcacaagcaggccccaggaggacccgggcccaagagcacaccacccaccccccaagccaggagggcccgcccaaaacagacaagggccaagaggcgagggcaccaggcacccacccagaaaccacagaaacccaacagaccagaggcaagagggaacgaacccacccccaaccggagaaggccggcacagaggaagcccacagccgcccagccacaggaacggagcaaaagaacgcgggagcgccaagagccaaacgcacaccccaaaaggagcagcggccagcaagaagaaacccagcaccagcaaagccagcacaaacccccacaacccaaggacccaagaacaaaagacaacccagggaacggccgggaagaaaccacccgcaacagcgacacacgaacggccgaggcaaccaaaagggagccaaaccacacaaaccagaagaccacggaagcgcaacaggcggagggggagagccacgaaaggacaaaggcacagagaggaagaacaacccagccgcacacaggcagcaggacggccgcgaagaggcagccagcacgccagacggcccaggccacaagaacagccagaaaaaagcccacagcagcccacaccccgcccgggaggacccaaaggcacgcccccaaacacacccgcacacccaagcagccacacagagaacaggggggggggggggggggcggggggggggcgggaggggacgggggccgcgcacagcaggccagcggagagagcgaccccaggaacaggcacagcaccagagacacccggggggccaacccggaccaccacccaagccccgaggaaaaacgccacccaaaaaacgagcggccgcaggcacacggaggcagcggccccagccggcccgaagcaccggaccaccgcaccgaacgcccacaggagcgaagggcaagagcggaggcaacaaacaaggccacccggcccgaaacagagacgccagaggaaccgaaacccaccaggagacccagaggccaggggcaaggcgggccacaagaaccagaagaaagcggaaaccaggacaaaaggggacaacaaagaggggggggggggcgggacacgaacacaagaagcaaagacaggcagaaacggcaaaaaaaaggaagaggggcgccacaagcccccaccccgaacgccacaccggaaaccaagacgaaaccgggggaaacacgcgcaagagcaagacaagaagcccagggccaggggaaagcgagggaggcgccagcgaaccaacgaaagagccggaggcaggaccaagaggccgcgagcaccccccccaaggcccggaaggcaccggcccccgaccagcaggcacaaaacggagccgaggcggaggaagagcaacacgcgcgcccgaagaaccaggagggcccagcaccccaaagcagcaacaaccccggaaacccagcccagggccgacgaccggcccgggcaacacgcacaaaggggacagacaaaaacaggcaaaacacaaccaaaaagcgacgcagacgcaaaagaacagcacagacagagaaaaaagcgcacaaagagacagcgaacccacccccgcccgggacagcccccccagcgcagaaagcacacaggcaccagaggaaccagcacagcggcggccgcggagaaaacaaccgacccgaagaggcccaagaagccacagaagagagagaaagcagaagaaaaaaaaaacgcacagaccagcaaaaaggcagcacccaagccaacaaggcgaagagaaagaaaagaccaggagaacaagagacaagcaaaaaaaaaacccaaaaagaccaaagcaaaacaggaaacaccggcaaccaagaaaaagagagaggacaaagaaggacgaaaagacgaagacaaaaaacgagcaagccaacagaaagaagaaaaagagggggaaaaaaaacagagggaaaaaaacacaaaacagcaaacagacggaaaacaaaccaaaaggcggaccaagcagaaggacaagaaacagggccaaaggacccagcagaaagcacagaagaagaaaagcaaaacagcaaaacgccacacacaagaaaggaacagggcaaggcagccgccccagcagccggacaagaacggacgggaaagcagacagaacaggaaaagaaaagcaaaaaagaacgcacaccgcacacgccgacaaaaccaaccacagcaaacacaagaaaaaaagaagaagacgccaagccagaagcgcggcacacgcaccaacaaacagcccgggccgccgcccccgcagccagcccgcaggaccagggcaccccggccgagccaggaaacaccccaaagacaccaaagaccagggccaccacgacacagcaccccccagaaccaccacccccaccgcacacccaacacccccccccgcagcgacgagcacaaaacacaaaagaaacagaggaccgaaagcgccacaaaacccaagcagaaaggaagaaccgcagccacacgggagagcagaaaagacacaaaaggcaacaaaaagcggcacacgaaaaccaacaccacagcggcagagagccacagaaagccacccaccacaacggggcccccccccgagaaagggccccacccaggcaagggaacacgaaaaagacacccgccaagggaacggagaacaaacgacaccaaggccccccccaaaacaaaacaaaaagcggccgcgccaaacgaagcaaaaccagccagaaagcccaaagaaaagcgagaggacaacagaacgccagcccagcacgcaaaaagccgcgggggagggggaagagcaagaaccagcacccaccacagacagacagcacaggcgaaacaaaaccaggaggacccccagaaaccaacaacagaaccaaaccccaagagcagaagcggcaaaaacacggaagcaagggccggcgagaagaacccaacaaagagcggcaaaagaacaaaacacccacgcaacagacaaaccgaagacacacagaggggagaagggcgaagccaggcagacagcaggcgcagcgcacagaagaaccacagccccccccccagaagaacccgggcgcccccagccaaggcgaacacccaccggcaaacaaagaaaggagggggcagagaaaggaacacagccaacaaggggcagggaaggaagcgccagaaggcaggcccagccccagacgccgccaggcgaacaacaaaggaggcacagaagacccacgcccacaccgacagcagggagaggcgcagcacccccgacgggcagggcacccccccgcgacccagcaagggaaggagggaacaacgcgcaaacggagagggcccggagaagaagcaaccagaagccggcccggccccacccccccccccaacaccagaaaggcccaaaaaggaagcagaacggccacggaccacaccagagcccgaggccagcaccagcgcgccaggggggggagccacccgcgcagcaccagcccaggggcacccacagagagaaagaggcgggcaaggcacgcacggccgaaaagaagcacgcaaaggcagagccagacaaacaagcccgcacacacccaccaccccaacgagaaaggaggggaagaccgacaaacaaaacaaagagggccaagacacacaacacccacacagaagcccacggaagaaaacccccccgaaggagaaccaaaccaggggaccaccaaccagccagaggaaaaaaaggcaagcacagaagaaaaaaaagcaacccaaaacagccaagaagacagcaacaccagaaacagaccacacaggcagcagacgggaagcccacagcgagaagaaacaccccacccacaacgcagcaacagggacacgccaggaccggcaggaccagacgcacaacacccagacgagccaaaccggcaggaaccaagaggcgaccaaggcaaaaaggaacagccaggaggaagcaccgggcaaggcaagccgggcagagccagaagcgagaggacacgcacagccaaaccagccacaaaccagcccaagacaccaccgcagcgaaccaacggcacacaccaagcaccgcacggagcaagcacaaaaagagccaccggcccacagacacaagggcccagccagcaagcaagagcagcgcacccccccaccgaggcgcaccgccaaacaagcagaaacaaggccggccccccaaacagggcggcacagcagagaaagacgcccaaaaacccccagaaaggagaacaaaaacccacagaacagaaaacagaaccaagccccagcgcgaggagagccaagacacacggaaccccaaagacggaggaaccaccgggggaaaccaagcaggagagagagccagggcaaacaaacgacccgcaggcagcaccgaggccagggaaccccgaaggaggacaaacacaggcccgaaccacaggggaccagacgcgcccaagaggagaccacccacccagcccaacggacagaccccaccagggacaggaaggcaagggggggaggcagacagaaagaacccccacagcacacacacggaaggccgggcgagcacccaacccagcacagaaacgacgagaagaccgacaaagcgacccggcgagagacaccacagaagggacgcacgccaaccccggaaaagcggaaggcgagcgcggaaccagaacccccccgcccagcgaaaaaaaaagaaagccacaaccccacaagccaggagcccaagcgaaaccggaccaagaggaggcccaaaaacacacagcccaagagaagcacaacggccgcacaagaaccaaaagaacaggcccgagacccagaccacaacacggcccacaggcacacagcgcgccgcagcaaccccagagaaacacagacaggaacagaagagcacccagccccgccccccgcaacccagccagcgagaacaggaagaccagcgccggccaggaagaaaggggagagcgggggggggggggggcacgccgggcaccccagacccacgccgaaaaagaccgacacaccacagcccaaccgaccgaaacacggcgaggagcgggcccgggaagcagagcccaccgcccagccaacccacccacccgcaaggaccccaaggccggagccaaaccccccagggacgcaccggggcccaaacaacagccccagcgacccagggacaaacaagccacgccaggcggccgaggccggaaagccggaggacccagacgcagacaggacacccccaggaaaccccagagcacagggagaaccgcaccacagggagaagccaagccacacgcaccacccgggagaacacgcacggaccccgaggacaggcgcacagcacagcgagcagccaggagaccagcacgcgaggggccaggagaaaaagccggcgagcagcaacgaccgggacccagccaccacacagagaaccagagcgggccgagcaaccaacgacagacaaacaacccgccgagcaccacacgagacagaaggagggcaggaccaaagaacgcagagaagaggggacggaccaaaacaaaggcaaagccccaaccagggggaagacacaacaccaaaagccaagccacccgacaagccggagaaagacaaaacaacaggagccaagagggagaaggcccaggcagccggggcaaaagccaaggaagcacagaagagggcaccaaagccacccaaacccaccccccccccacccaaggcaaagggcccacccacgacgggccccaaggagggacaggaagcgagcgcaagggcggcagagggcaaagcccaggccggacccccacacacccgcggcgccagagccccgacgggccgaggagccccccaaggcacgggccggcccaggagcgcccggcgcggcgagacgcgccaaggaccccgccgccccacacgaggcgaaaggaggccgcggaaacccacggaggcccgcgcagggagaacgcgccccaggacagccaacaaagcccgggcgaccggggccacggccagccgggcacgggggcacagccaccaagggcggccgccggggaggggcggccacacccccccagggacgcgcccacgcccgaggagacaccacagaggccgaagggcgcggaaggggcaaaggaggggacacgggggacggggggagaggaaaaggccgaacgggcgacgacgccccccggggcgcacggagaccagcaccccgggggggcagggggcggcgacgaaggaaagccccaccccagaaccgaccagagacagccgccaagcccgaggggacggccaccgggcacccggc

SEQ ID NO: 741 - RNA, 5791 nt, Mus musculus
ggaccagacaaccgcgcccagcaaagcacggggcgcccaaggccccccgaaacagccagcagcagcggaccccaaggaaggaacaggcggaaaagaagggcacacacacacacacacacacacacagcagcacgcaacagcaaacagagaaagcgggaacaaaacacaccaaaccaaacccagccaaaaaaacaagggcccccccccaaaacgaaacgagggcaggagacaaagccggaagaagcacaaaaaaaaaaagaaggcagagcacaaagcaaaagcaacaaaaggagccagccaacgcaacaccacacccgagaacagaacaccagaaaaacaggacaaggaccccaaggcaaaccacacccagagaacagagcagcaccagcagagaggaggaagccacggcccagcgcccacgacaacccccaggcccaggaagacggaacacaaacaagagcaaggccgacccaaagaaggaaaccaagccaccacagagaaacaaacaaacaaacaaacaaacaaacaagaacccaaaagcaaagaaccaaaacagggccagacaccacaggccaaagggcagcgacacgcggcaaggacaaaacagaggaaggcaagaacggcaaccaaacgaaagaaaaaaaaagccgaaaagaaccacagccccccagggacaacacaccgccaccaaaggaccgcggaacggagggcaccacacgggagaaaagagagagaagcaaacagcagccagcgaggaaggacgggaagagcccacagaagcaagaggccaaagaaacgagaaacgacagagcgggaaaggaggcaagcagccagagacccaaagagaagaaaggagagcacagaggaagccggaccaaggaccccagcaaggggcagaggacccacaaacccgaagcagaagagcccggagccaggcaaccggagaaggagagaagaacagaacaaagcaggaagcaaggaaaggacaccggggacagcaaaaacaaaaagcaaaaacaaaaacaaaacacccaaaacaacaaaaaaccaaaaaacaaaaacaaaaaaccaaaagacaaaaccaaaaacgcacaccaagaaccagcaaacaggaaggaagcagcagcagcacggcaccggaaagcaacacacaacccagaaggccacaaaagcaaaaccaggcaacagcaacaaccgaaaagaaagagaaaccagagaacacacaaaagaaagaccagccaaagcaccccaaaagcaaacccgggaggaaaacaagcagaggggaggaacacagaacagagccaaccagcggacaagaaagcgggcaaagacacaaagggagcaggcagaccgagcgagagcggacgggaacaaaagaggacagcagagcagcgaagcgacaggcccagaagcagaaaggcacggcaaggaggccgggaaccgagaaagagggaacgcgaagaaaaccaggaaacagcggggccacacaggggccgagaaagaaacaggaaccaaaagacaggaggaaggcaagcaagaaacaagacgcccagaaagccagaacagaaagacggacaaaaagaggccaaaggaagacaagaagaaaggaccagcaccaaaaaacaaaaggaccaagaagggccaggacaaggagagcaaagaggagaggcccaggaccccgcccccccccccccagccccccagcaacaccccaagagcaccccaggcacccccacccccaccccacccccacccccgcgcccgagccgagcagccccgagaacccaccacccccacgcccagacgagccccaccggggccagcccccaagagaggaaggaaaggaagcaccaccggcgaccacggcaggaaaagaaaaagaaaccagccccagaaaccacccggggcgagcaggagaagagagcccgccaagcgcggggcaagcaaagcaccgaccacaccaccacggccagccaagagaaccgaaagggcgagaccaacaacagggagacacaagagaaagacgagcaaacaccagaaacagaggaaaaagaagacagaaggaaacagacaaggaccaagcccagacaagcagcaaaaacgccaaacaaaagcacgcacaggcacggcaccacacagagcagcccaagcaccgcccccaaggaagcagggacagccacagaaaaccaccgggagaaggagacacaccacaaggaagccgcaacggccaaagaggacaaagggcaaaaaacccaccaggcacagaaaggcagacccaagaagaccaggaaccgggaggaaaagaagaagcaaacaaacagggcggaacaaacggcccccacgaacggaccagaacaagcacaagcagcaaaacgaacccaaagccaaacccaacaaaagacggaagagaagacaaaaagggcagacagccaaaaaagagagaccaaaaaagccgcaaagacccaacaccgccaggacaacaccgagaaaaccacgcccaagaaccagagcgagggcgggagacaggaaaagaacaagcacggcggaggggggcccacgccaacccagcaccgggaggcagaggcaggcagacgagcaaggccagccgggcacaaaggagccaggacagccagggcaacagagaaacccgccaaaaaaaacaaaaaaacaaaaaaacaaaacaaaacaaaacgaaaaacaagcacaccagacccgacccagggaaggcagacaaacacaacaccaagacgagagaacaggaggcaggaagagagcagagacaccagaagagaccccggcccggcccaaccacaccaccaacaaacgacaacaaaaaaaaaacaacaagaaaaaaaaccaaccaaacagccgcagagagaccaggaaggggggggggggggggggggggggggccaccgcagcgaccaaacaaagcaaggaggggaaaaccgccacacgccagaccgacagcaggggggggcacgaacaaggcacccaccacaaccaagaacagcacggcagcccgaaaaagaaaaaacaagagcgaggaagccaaaaagagacaaaaccgaacccagggaggaaagcgcaagcccaacgaaagccggccacggcggacgcccagggggaggggcagcacgacggagcaggagaaaggcaaggacaagcgccggccgcccccggccaacggggggaaggaccacaacagggggccgggaaacccgagggaagacagcagagccccgaggcggcaccgagaaagaggaagaggagcagagcggaacagaagcaggaccagaacccgagcaaaccggagaaaaggaaggcgcaaaagccaagccaagaacccaaaacaacaggagcacacgacagaagggcagaagcaggcggaggacgcgacacggggcaccccagcagccaccacaagcggggacggggaaggggccccccaccgaggcaaaaagcaaacacggaaacagcaagccccccccgcccaaagcagcccaggaagaaggggcaaaagaggccccagcaaacaaaacaagacaggaaggcgcagaggggggaggggaaaaaggccccccgaaagaaagaaagaaagaaagaaagaaagagagagagagaaagagagagagagagagagagagagaaagaaagaaagaaaggaaggaaggaaggaaggaaggaaggaagaaagaaagaaagaaagaaagaaagaaagaaagaaagaaagaaagaaagaaagaaagaaagaaagaaagggaggaagggaggaaggaagggaggaaggaaggaaggaagaaaaccacacgccccagcgacccagaaaaaacacacgggaaagccagaacaccaccggcagaaaaacggccagaacgagcaaggcagcgaagggaggggagggcgggccccgcggaggaagacacacagagggggacacaggagggcgacaacacaaccgcacacagcacgcgcaggcagaaagcacccgagggacacagcaaacagcagaaaaaaagcgcgaaaaaccaccagccagacccgggaaacagccccggggacaggggaggagggcacaacaggcacgcaaaagggagacaaaagggcgggcccacaaaaaaaaaacccacggccacggaaacgaaaggaacaaaacccaaaaagagccaacgaagcacacgaccgacaccagcaaaaccaggcagggaaaaaggcaagcggacgaaaaggggggaaggggcccagcaaaacaggccccgcgcaggcaagggggccaaagacccgaaggcaaacaagccagacacacacacacacacacacacacacacacacacacacacaccaccacaccaacaaaacccccagcaacgcaacgcggacaagacaaaggcaccaggagaaaaaaacaaacaaacaaacaaaaaaaaacaaacgaagcagaaagggacggaaaggggcgccaaagcgaacgaacaccacaaccgacagaaaaagaagagcaacacacccccaccagacacggcccaggggacgaaaaaaggcacaccagagacacgagggccggaggagacccgcacaagaaaaaccaaggcaagaagcaaagccagcagaaacacggagacaaaacgggaagacaagaagaggacagagggggacagccaacgacaaagaaaaagacacagagagacgggaaggagaaggaagcccaaggacaagggaccaacccaaggaaggcaaggaggccccaaggagacggcccgcaggcaaggcagacggagaacaacaaagaggagaaaaaggacacaaaagaccccggggccagccaaccgagcaggaaaggagcagagcaaacaccccagagaaagaaccaggcaagaggccaccggcggaggaagaaaagaaaggcgacagcaagggcaaaggggggaagcgggcagacacaagccagagcacaagggaaaaaggagaaagcggaaaggaggagacagggggagagacaagaagagggagaccacagccaaagaggcaaacaacagccaaaaaacacaaagaccaacccacaccccggaaggagaaccagaaaaacaggaacggggcagagcccacaggaaaagccaacgccacaaaccaagacggagcaggaaaaacacacaccagaagaagcaacaaacggggaccccccccccccccccccccccccccccccccccccccacaaggaagcaccagagccgccaagcggcaagaccagcacaagcaaaaagccgaggacaagaaagagcaaaggaaaacaaaccgaagaaaggacgggaagaagaacacaccaacgggcccgaggcaacccagcagccgcaaaacaaggacaagagccggagcagaaaaaagagacaccaacaaaaacccccacacccccaccaccccaccaccacccccaccaccacaccaccaccaccaccaccaccaccaccaccacaccacacccccaccacccccaccaccacaccacaccaccaccaccaccacacaccagaagcaagagaagcagagaacaagggcagaacgcagaaccgggaccagcaggccccaccagcgcaccagagaggagacagcaggacaacacggacgaggggaaagggaaaggagccagcgaaaaggcgaggggagagggggcagagcaagagacccagcggaagccacagagagcgacaagagacaccagccgaaccccaaagacaagagagcacaaagaacaagcagacgagaagacaagccgaagccaggccagggccac

SEQ ID NO: 742 - RNA, 752 nt, Mus musculus
cagcgccgggaagcacggcgacccccggcggaacgagccccaggaggacaccacgggcagggggagccagggggaaccagccagagccgaggcgcggcgcacagggccgcaccggaggcaagacagagaacacgcaaaccccaagcagggaccccgcagcaagcaggcgcaaacacagcagcgggccacgacccggagccccaggggccgggaaaccacacccaccaaaggacagccaaaggacacccagacacgggaccccacaagccacccgaggccggcagcaccaggcaaacgaacagaagagaacgagcagagaggagcgggcagagagagcaagccaccaaggcacccagaagcaaggaagaaccaaccaaaaagaacggggccagaagggcggggggaccaggcacgggggcccaaagacagaagagaggaaacggagggggggaaaagaaccaaggaccaagagaaaaggggggcgggagaggccagcggaagagcaccgacgccccagaggccgagcaaacccagcaaccacaggggccacaaccaccgaagagacgagcccccggggcgaagacagcacaggaccaaaaaaaaaaacaaaaaaaaaaaaaacaaaaaaaaaaaagagaaaaggcaacgggcaggaccaggagcccggcggcggagccccagggaccgccgccccgcccccgagggggaaaagaacgcacaaggggggccggggacaggaggcagagacaagg

SEQ ID NO: 743 - RNA, 3392 nt, Mus musculus
gcgccggagacagcggggccagcaaacacagaagggagacacagcagcaggaggacacagggccccaaggaggagcagagaaagacccaaggagcaaagggacgcaacccaaggggaacaacaaagaacaaccagaccccggagccgccagcgcaagacaaaagaggccagcagccacacggaaagagaggcccggacgcaaacaagccccagacaggggaacgccagggccaaaaagggggagggggggaggggaggggggggggggagggggacgggaagcaggaaagaaacgaggaaaaaccaaaaaaaaaaagagagaaaaaaaagagagccccaggcggagagaggccagggaagagcacgacgccccagcggacgagcaaacccagcaaccacaggggccacaaccacggaaggggcgagccacccgggcaggagacagcacaggacgcaaaaaaaaaaaaaaaaaaaaaaagaacaaaaaagaaaaaagaaacccacagacaaacagcagcaaacagggacacaggcaacaaaagcaggacaaaaaaaaaaagagaaaaaaagacccaagcgggcgggggcgcacgccgacccagcacgggaggcagaggcaggcagacgagcgaggccacccgaggagccaggacagccagggcaacagagaaaccgcgaaaaaccaaaaaaaaaaaaaaaaaaccacccaaaggcaaagcaagacagcaaaggaacaacacaagcacgaagacggcgccacaaggccgcggacagaggaaccggcaaccccaacaccaaccaaaagcacggccaccgaaacagcaaaacagcacaaaacagcaacaaacacaaaccagaaacaaaagacgaaaaaaccccccccaggccgggacaaggcaaacaacaacacaagaagccaccaaccccaccgggagaagggcaggagcgaagaggcaaaagggccaacgagcagaaaggacacacccacaacaggcaggagcacagccaaacacaaacgcgaacgcaaacgcaaaacaacgaagagcaagccgcgcgaggccaacaagaccgggaccaggagacagaaggccacacgcagagagggaaaaaacaccgcacagagcacggcacacaggaccgagcgccacacaacgaacacagcccgccacgccggcgaaacacgaaagagccgaaacggccgcaaacaccaagaagccaaagcaaggaagaagagccggcgagaaggggcaagggcagagagaagcgccacaacagcacagagcaccaacacaagagacacaacaaggagcagccaaaaacaccacaacaacagcagaaaccaggggaccagcggcccgaaaacaccaggaagaagaaggcggcacgcagagaaccaaaaagcaccgcacgagcacgacaggccaaggcaacccaggaggaaccgaagcccacgaacccgccagacgcagaccaccggaaaacacacacacacacacacagcaagaaggaacggagacacaaaacaaggccccgaagaggcaaaggggggaccaaacaaaaagccaaaacacagacaaacagaaaacacggcaaccagaagcgaccaagagaagaggaggacccccccgcaaggaaagagacgcacccagaaaagcagagcgaaaccaccaggcaagaggcaagagcccaggaaaagagaagcaaaaaaaaaaaaaaacaaggggagacgacgcgagccaccagagcggggagccaccggaaggccaggaacagaagcacccgcccccagcccaaagagaaaagaagaaacagagccgcaagaaacagacacccacaaccgcacagaggccagagagcacacacacaaagggccaccgaaacaaggacccacccaaaaccaaagaagcagaagccggccagcaacccacaggaaaaacccccaccaagggacacccaggaaaagcgcagaggacagcgaggggcacgagccccccccccagaggaaggggaggggggacaccaaaaaccagggacacaaaacgaaaggcaagagaaaggaaaaagggaaccgaagccacaggacaagaagcaaaacaaaaaaaaagcaaaacgaagaaaagaaacgcccaaggcaagaggcaaacccgaacgggccacaacagagagccccacaaaaaaaacaaaaccgaccaaccgcaaaaccaacccagcccccagagaaagccccagcaaacccaacacacgccccacaaaacagaaagcgcgacaaccaaaagcaaagaggacccagcaccacgggaccggcacccgcaccagcagcggcccagagagacggaaccccgggaacgcagggggcccagccagcagccacgcgcaggccaagacaccagcggccaccaaaaaaacagaaagaaacaaagcaagggaaacggagcccacaaagcccccaaaacgcgccaagcaagccccccccaccggggggggagggaaaccaaggaggcgggagcccccgccccacaccccacggcacccggcagaccacccacaagcccagaaacccagagcaacaagggagagccccacgaggccggcacccccaacacaccaggacgcccaagcgccagcccacccccccaccagaacccgggacacagcgcgcccgcggaggacgcacccggccagcaccagaacaagcgcgaggggacgccaggacccgcccggcaggggcgcgcgcgaccacccgcgcgccgccgccaggacagggaaccgcacgcacccagagcccggccccgccccagcggggaggagggagggcggcgaggagccacggcaggaaacgcgccccggcggcccacgcacaccaacccccaaaggccgcgcagcaccacggcacacgagccgggcagcggccgcacccgagcgcgcccaaagcccgacccgggaaaagcccgccccgccaaagccaggggggaaagcccgcccccgcccaccggcccacacaggaaaggaaaggaacccccacaccgcccaggccaaagcccacgggccccaggacacacaggacccgcccccagccgccccgccccaacaccagagccccaaccaagcacccagggagccagcaaaccaggccacagcgccgcccagaaggcgcaccaacaccgccggcaggcccgaagcgcgcccaccccccggagaaggcacgaggcccaagcagggggacccagggccccacgcccaacgaggcgcgcagcgcacacccacagcagagaaaggcccgaaagcgaggagagaagaaaacaacccggcaaccaccgcccaggaaagcagcggcaggaagcacgcgaagcacacgcgaacgccaccacccaaacagccagcaggcaagaagg

SEQ ID NO: 744 - RNA, 16157 nt, Mus musculus
aaaacaggggccaaaaaggcaggaaacggagacagcgagaaagggagggaaaaaacaaggagggacccccccacagaagaaacgccagaaaaaaacccgaaccgggaggcaagaaacagcggaggagccagagaggggcccaggggcaagggagggcgggccacagaggcagggccagggagcacagaggagcggcaccagcacgggccagcggagacgggacggccaaagaggcccgcagcgccaaaagaaagagagacaagagaacgaagaggaagcacgaccaccgagggaaaaaggggggagaaagaaagaaaaaaaagcacagaagaaaaaagagggaaaaaaaaaaaaaggacagaaacaaggagagaaaaacaagaagacacacaacgggacaccaggaagagaagggcgagacagacggccccgcagcacaccccaaccacccagaaaaaaaccacggccacagggcggagaggagacgcccaaacccagacccgggaaaggccgagacacagccagcagaaaaaagaccccccggcaaaacaaccaccagaaaaccgagagacagaaagagacagccacaaacgcaaggacagggcacaacaaagaaggagagcaagccagacaagcgcaagcccaagcaaaccaaacacacaaggggaaaaggacaaagaccgcagaagacaagaccagagcagaggggaggagggggagccagagaggaaaggggaggggggaagaaacaagaagggaaaggaaaacacacacagcagaaaaacccagggcgcacaagacagaacaccacaagcacacacagccccagagaaaaacagaagacgaaagggaagaaaacaagaagccaagaaaagggggccgaccagcaaaagaagcaggagggagggaaacacaccagcccgcagaagagcacaggacccaggaccgaacgaaagcaacaacccagccaagagaacccaacaaaggaaaaggcccaaagaaaacacgacacaggaaagcccaaaagcaaaggcaaacgaaaagaaaaaaaccaaagaagagaacagaacgggacaagcaagcagccagagcggacacaagccaccacagcaggaaacagggcaaggaaagccagaggcacacaaggcccgcaccacgccacggaaaaggccccacccgcggacaccaggagccaaggcccaaagaagaggaaaaacaaaaacccggccacagaaaaacaaaacaaagcccgccgccgccccgcccccccccccccggacaggcagaagcgcacccagcgacccagacccccagaggggcccagaccacgaaagcagacaacacacccaaaccagacacgaacgaaaaaccaccaccccaccaccccaacagacacgcaaccgcacagcccaacacaaaaggacgggcagcagggacgcgccccccccccgaccccagaggcagggacagccaccacggcagaagacgccacggagagccccgcaaagagaacgacaagaacaacaaaaggaagccagcaccccacgcaaaagaaccacagagaaccaggagaagaaacgaagaacaagaaaaaccagaagcccaaacgaaagaggcagaaagaaaaagaggaggaagaaaaacccaaagaccgacaggacccagcaagggagcaaaccggcagaagaacaggagggggcaaccaggggcccacccagaacaaaaaggaagaagaagccaaaaggaaaagaggggagacccagcaacacaaaaaagaaaaaaggagaaaggaggaaaaccagaacgaccgaaacagggacacccaccccccccacaccccagccagaaacaccagccgcccccccccgcacccacgcagaagaacacacagcaaaagagcaagagcgcagccccaccagcaggcccacagggaaaaggaagagccaaaagagaaacacacaggggcagacaaaaccgccacagaaaagagcaaccgagaggacaaaagcagaagaagaagagcagcgggggcacaacgaccggacccaaaaaggaaaaagaagacgaaacgaaacggccacacaacaaggaagaaagccccgcccaaggaacacacagacagaaagcagaccaaaagcagagaaaaacgacagaaagcagccccagagaaacacaacacaaccgcaccaaggccagagaaccggaagaagggcagaaagacaagacggagaacgggacacgaggagaagaacaacagacagagaagcacaacaggaaaggcaagaaagaggccaaacaacccgaaaaaagaacaccaaggcgccaggggacaaggaacccaagacccaccagaaaaagagcagggcaacaaggaaggagaacagcccagggacaaccacccaccaagaggcaacaaaacacaaaagaaaagaagcgagaagggggggggggggggggcgggcgggcgggggggggcggggggcggggggggggggggggacaagaaaaaaagaaaaggaaggccacagggagaaaaaaaggagggagagaggaaaaagagagaagacaaagaggagaaaggaaaagacagaccaacagaaaccagaaaaagaaacaaaaaaggggaacggcaggagcagaccgaaacccagcaccaggggggcacaagcaaggccacccagcaacagaggcaagcaaaaaagagaggagcggcccaggaaacccccccaccaaaacaggcccaaacaaccaaaaaaaccgagggggccgaaagcaccaaaaaccagacaggaaaacaagagaacaaaaacaaagaagagaaacagacaaggaaaacacgcgaagaggaaagagagggggagagagagagggaggggaggagggagaagagggaaggagggagagaggaaggggagagggaggcagagggagagagagcacggcaggaaaaacaaacagggaaacgaaccagacaacacaaagaagcacggaacagaaaaaggcaacaacacaccggagaaaagggcagaacaaggaaaacacagacgacaaaaaaaagaagagagaaaaaagaagcccagccaggacgcaagccaggaaagcaagcggacccaggggaggccaaaacgggaagcaagacccaccaaggcaggggacaacaaaacaagacaaaaaaagaaagaagaaaacacccagaacccgccccgaaccacaggggcacgagggcgaagggaaaaaaggacaagacagagaacaaggagagccaaggaacaagaacagagccagaaagcagaacagggaagaaggaacaacaagcccaccaagaggagacccagggggagaagacaaaagagcaaggggaaagaaaaccgagcacaagaaaagggagcaagaagggcgaccaggcccaacagcacagcacagcaagaaaacagaacaaaggaccaaaaacccccaggagagagaaagacgaacaaggagagggagggaggacaccaggagaaaggccaaagcaacaaacgggccgacaggaaccacgagacgaaggacacaagggggccgcaggccccaccgggcccacaaagcaggccaagcgggcgagaacccaacaaagaagcaggagccgaggccgcggagaccccccaggaccggcaccaagagaggacgccgcaaaaaaaaaaccaacacaaaggcaccccaaagcccccaaccccccccgcccgcccccaacccacccaccccacaaccggcgggccacgccgcggggggggccgaagaggaaaagaggggagggacgggagagaagagaggaaaagcagcgaagcagagggacggacagagggaacaagggggagggagagaaaaacacaaaagaaaaacaccccgagggcaccggagcacccaaaacacgcgacaggcgccaaagaagccaggagaggagcagaaagaaaaacccgggcagcaagaagagcagaggaggcacgccaccacagagaacagcaaggagccaaccacgcccaaccaccccacaaaacaggacagaaaaacaaaagcagcagcaagaacaggcaaccaagcagaagaccaaacaaaaagcgcaaagaacaaaccgccacccgaggcgagaacagaagaaacacaccacacgccagaccagggacagcaagacaggagggccaaacaaggagggaaccagccagcaggaaaggcagagagaaacaccaagcaaggaacaagagaggcaaagccagaaccgagaacgaaaagggagaaacaaagggcggcaaaccacagacaaggaaaggcaaaggacaggaaggggggaaaagacacagcaacgcccaaaagacacaaagccaacagagaccaaaacaacaacaagaggaagcacaaaggcagaaaaaaagggccaagacgaagccagcaccacaggcaaaacaagagaaggaaaaaagaaagaggacaaagagacagccagggggcccgcgggcccggcaaggcaacacacagaggaagggaagaaacaaaggaggggaaaagaggaagaagggcgggcccacaccacaaggccacacccaaaacacaccaagccaccaagagccagcgcgaaagcagggagggacagggccagccagaccggaagacacaagaccaaacccaggaagcgagcggcagagaaggcaagaagggaagagcaacagaaaagccaaggccagcaccaaacccagaacgacagcgaaccgaccaaaccccccacccaacaaccccgaggaaagaaaccgacaaagaaggagcaggcacaccagcacccgccgaaaagggcgcacaacaccgcgagaccagccgccccaaaaagcgcaacccagccagagcacagaccagggccgggggcaggagccgacacaggccaaagaccacagcaaagaggaaaacccgcagagggggaaaagcagagaaaaaacaaccgcaaagagccacgagagaaaaaacacacacacaacgagcaacaaaaagggacaacaaacaggaacagacggaggaccccccccccagccaccaccaacaaaagcgaagcacccacacaaaaagaagcaccacaagagcaaaagaaaaagaacaacaacaacgagccccgaccaccaagccacgaaagaggaacgggagcaaaacacacacaagcagagcagccagagagggcagagacagagaaacaacaggacaaaaaacacagcaggacaaagggaacagcagaggcagaaaaaaaaaaaaaaaaccacaaccagcacccccggccacccccaacagccaccgccccacccgcccaagaggagccccaaccccacccaccagaccccccacccgggccagggcgggccaaaggaggccaacaccaagcaaccaaaagcccccaagcgagggagggcaccccacgaggccagaacagcccgcgaaagagggggcccaagagcagggagcgccggggggaggcgagaaaccaggggccaggaggaaacgcagccagagggcccacccagccccagcccccaaccaaccacaggacccggccgccagcgaagacgcacgacccagcgagggaaccggagggaagccagcaggcccgcgaagcacaccaagcacagcaaaggcaggcggagcaccccgagcggaccaagggccagcacggaacccaccccagcccccagcccgcagccagacagggacaacgggagaagacggagaggcaaccagcccccacgagcccgccacggaggggagcacaagcccccccacggggcacacaaggccccggcaccgagcaccaggacagacaacaggcaagagaaaaccccggcaacacagcaggacacagacgcagcacagcacaaaaaacacccaaaaaagcacgaaagaaaaaaagccaagagcaccaggccgacgaccagcgaaaccccccggcaggcaagccaggaagaggacaggaacacagcaaagccccaagaggcacagcaaacaaaccgagagcaaagagaaggccaaaaaagaaacaggaaagggcaaacacacaaaacaagaaaaacaaaaaaaacaacaaacaaccagcggagaggcaaaaccaggccaaaaaaagcagaacaacacaaacgaaaggccagaccgacaggagaagcaaccgcacacgcaggcagcccaaaagaggaccacaaaaacaccaaaccagcccaagcaccaaacaagcagccggcagggcaagaaacaaacaaaacacaaggccgagaaccaaagagcacaagaggggggccagaggaggcacacaggaccagagacagcgcagccccaaaaagcacaaccaacagaagcgcagagaaacaaagaagggaaagaaggggaggggaaggggaaaggcaacggggaggacagaagaccaagaacagaaaagaaacacagcaaaaagagaccacagggaagcacaagcccagccgccagggccaacccgaagaagcaacacaccgaaagacgaaggaaaggaaaaaaacaacgcacacaacccgaaacaaaacccacgacaaaagagagcaacaggcagaagagagaagcggacagaagcaggaacacagcagcccgaaaagagccaccccccccagcacgacccagcaacaagagcccacacagaacaaacgaccagaacggaacaagaagaaggggaagaaacacagaaagggccccaagggaggagcagagaaagacccaagcgaaggggcgcaacccaaggaggaacaacaaagaacaaccagaccccggagccagccagcccaagagcagaagaggccagggcacagggaagagaggccccggcgcaaagaagcccagacaggggaagccagggccaagaaagggagggggggaggggagcaaggcagggggagggaaagggacccagaagcagaaagaaagaagaaaaacaaaaaaaagaaaaaaaagaagcagggaaggggaggagggagaaaaaaagagacagaaagaacaaaggaaagaagaaacagagaaaaagagagagagggagggaaggagaaagagagcagagaaacaagaaaagaagaggaggaaaagagaggcaagagaaggagagagagagagagagaggaagagagaggaagagggagagggggaggggagggggaggggaaggaggagaggccaaggcacaaagagggacagcccagcaaacagaaacagacgcgcggccacaccaggaagcaccccgacgcggagaaaggcagcagaggcaagcacagcgacacaagaaaaaaaccaaaacaaagaaaacaaaaccacagcacacgaacgacaaagagccaaaaacaccacaaagggaagacagccccaacaaagggggaaaagcgcacaccacagagagaacaaaagacagacaacggagaacaaacacaaccccaagggacccaagacccagggaaagcgaagccgagcaaagaagaaagaaacaaacacaagacaagggaaggaaagaccgaaaaggcccaagcccaggaacaaggccaagaagacaaggggacccaaaaaccaaaaggcgcacagcagggaaacaaccaagggaaaaaggaagccacagaggggggagggacagccaccgacacgacagagaagagcaaaaaacaaagaaacaaaaccaaaaagacaaacaaaaaggccaacaggggcgagcgaacaaagagccaaaaaaagaaaaaaaacagcaagaaaagcaaaacacagacgagcaaagaaagaaaaacaaagaacgagacaacccaccgacaaaagcaacaaaacaacgccaccaagcggaaaggagcaggaacagaagaagaccccccaccggggagcaaagggacagcacggaaacaagggagaacccaaaccacaaaaaacacaaaacagcaagccacccggccaaggaccaacacaccaccacacaagcgagcggcagcagccaacaaagcagaaaaggaaaaccaaggaccccacgacaaagaaaaaagagagaaaaaaaaagaagggaggacacacagacacacacaaaaacacaaaaaaaaaaaaaaagaaacaggaaaaaaaaaagaaccggaaagggaaacagaaaaaagaagagaaacaaaccaaacccagaaagacaaagggcgccggcacgggcccaacacacacccgagaagaaaaagacccagaacacagggaagaaaaacaggaacaaaaaaacaaagagaaaaagggggaaaaaggacaacggggcggaaaaaaaggaagaaagaaggagggaaaaccaacaggaacaggaaaagcagagaacaggacagaccagaaacacaacacaaaagccaacaaaagaggccaaacagagaaagaaaaaaaaaaaaaaaaacaaaacaaagagaacaaaagagcgcaacagaggcccaaagaccgacacagcacaagccaggcacaggaaccccgacccaaccaaggccccacccccaaagcaggccggagggagccgaccacagagaccagacaaggagaaggaaggacaacgcaccacagaaacgccagggccagcaccaggaaaagcgccccacgggggagccccgcgaagacaaggaccaagggggggcaacagcggccacagcgaaagacagggaagagccagaagccaggggaaacacaggcggaggaagaagaagggagggggggcgggaaccacaaggaagccacccagcgagaccaccccgacccacaggcacagaaagaaacgcaaagcaaaacagggaacaaggggggaaaacacacccggagaagcaaaagcaaagacaacacgaacaacaaggcaaagaacccgaggaaagccaaaaaccccagccaccaccagaaggcccccaccagggaacacaagagagccaaagaaaaacaaaagaacacagaccaaagagcacgcaccgcacgcaaaacacaaagacaaacgcaaaaagacagacaagccagccggaaaaagagcaagaggaaagcgaggaacggccaaagcacagagaacgagaagcacaggcaagcaggagagaaagcggcgccaacgacacgacgcccggaaaagagaagggggacaaagaggggaaaagccaaacacccacccacggggccccccgcagggaaagacacccgaggggaaaagaccaagaggcgccccaaccaaaccgcagaagagagcaaggcaaaaccgcgggcacagcggaaaccaagaaggaggaccagcacaacacaccaggaaagcccacacccccagaacaaagacgggcacagcaaaacacaaaaagcaacaggaacagaagggggagaacgcacacaaaaccaggaggcaaaaacacggacccaacccacagaacagacaagaaaaccggcgggagaagacccaaagcagagcagcaggaagacagacggaaacagaagcgcagaccggcaacaagaaggaagcaaaccggagccacagagaggagacgcaaaagcaagcccgccgagaaaaccccggcccgcggcccccagaggcagggccgccaccgacacggcccggcgcccaacggccacaggacggacacagcccaacaaaggaccgaagcccaaagagggaaaaggccaaccacaaggaacacagcagaccagcaagggcccccaccacaacaaaaagaaaaacccaaacaaaacacagaaagaagaacaaaacaaaagagaagaaacaaggaaagaagaacaagaaacaagccagcagggaacaacgaaaacagaaaaagaaaagggacacacacacacacacacacagaaaaggccgccaagaggaccgaaaacacaaccaaaccccaacagaaccccacacgcaagcacccacgggagggggggggagaggggggcggagccccccccgccccccccccaccaccgcgccgcccgccgcccccccccccccccccccccccccccccccccccccccccgagggggggagccaaaggacaacacaaccaggaggcccagccaacacgccagcagggcccacggccagaaccacaacgggcaggaacgagcagcggcccagggacaccgccacccgcacgggaaggagcacacccaaccccgaccagagaccaaccagcagcggcaaggcaacagcacgccgacgaccccagccccccaacacaaccgagcaagagggacaacaaaagcgccggaaaagccccagacagaggaagagaggcacccagacagagccgggagaggccaggacagcgggcgaagcaaggcccgaacaacaggggggggccgaagggccaggccggcaggagcgagccgccaccagcaaggaggaacgccacccacagcccacaggcccgggagggggccccacagcggaacaggccggaagacaggacacagggaaaaagagaagagaaacccgcgaccagccgggcccaaagcggaaacggacaggaaacagacaagccggaaaaccaaaccaaggggagaaaagggaagaggggaacagaggggacagggggcgaagcccacagcgagaccggagccccacacacccagcccggcgcgagccaggcacagacagacaggggagcccgccaggaggccaggaccgacaaaaagaccaggagagacagaagggcgggaaaaggaaggcaacccccggcaagcaccacagcgcggaaccccccaggacaaagaccacaaaagcaccacccagccccaacccccagcgcaggaaaggaaaccaaaaagcaaccacacaagggaagcaaagacacacaaaagaaaaaggaaaaaagcaccagaaccgccaagacaaaaaagccaaaaaaacgaagggccaacaaagacagaacaggagacagcacaaagaaaaggcgaaccacccaaccagaaacaacaaaaccaaaagaacaccaagaacaaaagcgaagacaaaaccaaaagcaagcagaagacaccgaccgaccaaaaaaagccaaaccacacaaaacacacgaagacaaaagaaccaacacaaagcaacccaaaccccaacccccccgccgcccccaaccaacccaccccacccggcccggcacccgacggggcaagaccacaagaccaagggccccccaacgagggcgacaggccacccgcaacaagcagcagagacacagccgggggacggagcacaggccccaaggggcagacccagcccgggacccagcccccaagggcccggcacaaaagaacaaaaccaaagcaaccaaaaagagaagggcgaccaaagacaagaagggggggggggggggggggcgggacgcggaggaccaacaccaggcacccaaaagccccaacccccacccaccccacccacccaccccaccggcccggcgccccaacgaggcacacaaaggcacgacaagggccccccacgaggccacaggccaccgaacaagcagcagagacacgagccgggggggggggaggaggagacaaggccaccaagaggcagacccagaccgggacccagcccccaggaggcccggaccaccaaagcaagggagaccaccgggcaggccccggcaaagccacaagagacagcaacaaggcccagcaaaacgcaggagcaagggcagcaggaggcgaagggagacccggaaggcagccagagaccacccacacagcccaaacgccgaacccccagggggcccaacaagaaggggcaaaggccacacggcaccgagcaggagcaaagacaacgggaccaagcgggcaaaccacacaggagacaacaggagcggagggacccaccaggagagcccccaggccaccagccaggaacaaaacacaaagcgagagacccaggaaagaccacacgaccacccggaaagacacgggcccagccggcaaaaccacgcccaaagggcacaagaagggggacaggggaaggaggggagaagaagcaaaagggaggggaagacagaaaaggagaaaaacaccaaaaaaaaaaaacgaagaaaaagaaaaaaagaacccacagaacaggagaaaacgcaaaacgcagcgaaacagcaagccaccaaaacgaaagaagaacgcacaaggaaaacacgaaagcaaccagagagcaaaaggaacaagaaaaaaggaagaaaaaagaagaaaaaaaacacagaacagaagcaaggaaaagcgagcacagaaaggaccacaccaacaaacagcaaaagaaaaaacaacaggcaaggacggcgaaggaccccaaagcggccaggggaaagggcgccagagaagagaggcgccccaaacgaagacacaaaacccaaaaaacacaaaacccaaaaccaccagaccaaaaaagaaagcaaccacccagggaacacaagacgcagcaacacaaggcaaagcagaaaaacaagccaacagaaagaaacaaacaggacgaaaggggaaaacaacccaaaaagcaaagaaaggacacaccaaagacaaagccgaaaacaccaagagaagacaagcagaagacacagcaggcgcaaagacagcaccaaaaaggcaagccaggcaggggagggagggagacagggggaggaaagagagagagaaaaaagggcgcccgaaaaaggccgagaaaagaaaagccaacgcagggagggggagaacggaaccaaaaacaccaaaaaggcgaaagacaagcagaaaaaagcaagacaagcggaaacacaaagcaacaagcgcaaaaacaaaccacaggcacagcccagagcccaacaggcacagagcaggcaacaaggcaaaaacaagaaggcccagggaaagggcgagcaggaccacacaacgaagaaaacccagaacaaggaaggaaggaagcggggcaggaaacagcgaagagacacagcaaaacacaaaaacgcaaaaagaaacccaaaaaaaaaggaaaaaaaaacaaggacaaaaacgcagagaaggggggggcacagcagcagaaccgaaccacagcacaaaacaagcaggaacaaaacaaggggcacgcagggaggcacacggcccaggagaccagaaaacgaccagcgggcaaagccagcaaggcacagaaagacagacccagaaaaaaaagaaagggaaggaacaggaagaagaacaaccagaggggccgagaggagaaacagagacagaacagaagagaagaggcagaccaaaaaaagagagaaaaagaaaggggcgcagaggccggaaaaccaacaaaaaaaggcagccaggcagggggccccaggccaaccacccgacgcaccagaacaagacacaaccagacgcaagcacgcacagccaccaccggccccagccagaaccccacaaaaccaaaccacagggaggcaaggcacaagaagacgagagcagaggagccgcaaagcaggccaccgcacaccaaaaaaaaccaggcacccagcacagcaaaggacacgacacaaggcaacaacacccaaggaacaaacacacacagccagcaaccacagccaaagaaaaagaaaagacacgccaaggaagggaagacaaccaagaagaccaggaagccagccgcacagagaaaaccccacaaacgaaaggcaaaaccgcagagagccccagaacgacagcacggacaaaccagcccaacacaaagagaaaacagcgagcagccgaaacaaaaagaaaacaacaggaaaacgaacaaagaagaagaaaagaaaaagaacaaagagaagagagagagagaaggagaaggaaagcaaagacaaagaaaacacaaaacaacagacaaagcagggccaaccaacggaccccaacagacccgcagggacccaacaaaaccgagacacaaacgaacagcaaaagaaacaaaacgaagcagacgacaggcaaccccggaaagggcgacacacccccccaaaacaggcaacccacagagaagaacgccccaaagaaagaagaggggcaacacaccaaaagaagaaaaacaaaaaaaaaagaaacagccagacagagaaacacaccgccgccggacacgacccgaagggagcccaggaggaagggaaaggaacaccaggacgaaagcaccaccaagccaagcaacgcgcgaccaaaaaccccagcccacaaccaagcacgaagacagaaaggggcgacaaaacaacagaggaccccccaaaaaggcccaggcgcagcaccacagcgaggccgcaggcagaaacgcaacaaacacacgaaaaaaagagagggcgcacccacaagacccaacacgcaaaaccagcgagaggggaagagcgcaggaggaagccaagccgagccggccgaaagcaaggcaaaaaaaccgccacagccacaggggaggaagcaccggaggacacgccaagccaaaaagcccaagcaaagaaacagcagaagaagaacggggcaaaaaaaaaaaaaaacgagacccaaaaaaaacaaaaccgagcaaaaggccgggcgcagaaagcccgcaaaaaacaggagcggggaaaaaaacggaaaaaaaaagaaagagaaggaagaggcaggaaaagaacaaagaacaaagggacagcgccaggagaggacagcagagagaaaagaagaaccaggcaagggaagaagagagacaaagacaggcagaaaagggcaaggacagaccaccaggagcgcagggaaccaaacagggcaagaccaagaggaaaaaaaaaaagaggcaaccgaagcagaagaaaccggggggggggggggggggggggagaacaagcgggaaaacaccaaacgagccagacaccgccccgggagaaagggccgaagcccggcgccggaaccaccgagaccagacggccgaaccagaaaccgccgcccgccccgaggcgggaaaagggagcgcaccagcccgccacacgccagcacagacaggccccagccaacagaaacgagcacacaacaggagccaccagcccagcacgcaaaggaggaagagaagaagccaaccccaccggagagggcaggggaaaaacagagcaggacagaacagcgaggaacacagccagccagaagcaaaggccgaggggcgcaggcggcggagacccacagagcgcagacacagggcagggcaaagcgggcgaagcaggggcagcaaaccgggagaaagcggaacaagggggaacaaagaaagagcacacaggacgaagccaccacagggagggggacacagggaagccaaaaagcagaccccgcaggaccaaagacacaagccacccaaccccaaaagcacagacgggcccagcagaagagaaaaagcaagcaaagccgggcagggagaagaaacagaacaacaggaaacgaacaccagcaggccagcaccacgaaggcgcaccaagcacccccccaacacccgaccagcgaaaaggaggcccaaggcgacaagggaagcccaagaagacgcaaaaagagacagggaacacagccaggacaaaagacagaaccagagccggaacaaacgaaacaggggagaaacagagaaagaaaagaccaaaaagaccaaagaaacaccaaggacacagaagaagcacaaagaaaggaaagccaagagccaaaggcagagaacggggacaggacagaaagaaggccagggagaccacaacaagagagaaaaaacccagagcgaaaaaacaacaaaacaagcaaaggagcagagaacccaaagcacaaacacgcccaaacccaacagcaaaggaggcacacagacagcaacgaagagacaagccggaacacacaaaacaaaaaaccgaagagaagagggggaaaaagcccaagaacaagaaccaaaaggacagccacgggaaaagaacaaacacaaaaaagacacagggaacaacaaaaagaacaagacagccccacaggagagccaagagaacccagaagcagcaaccaagagagcacacacagcaaaaaaaacaacaaaggacaaaaccagccccaaagaaacggcccacagacgagggaggacaacagaaaaaaagcaaaaacagagacacaaaacacaagaaaccaaaaaaagacaccaacacccaaagcccaggcaagcagagaaggggcaaaaacacaga

SEQ ID NO: 745 - RNA, 3359 nt, Mus musculus
aaaaacaacaaaaaaaacaaaagcgcccggcaggcgcacgccaacccagcaccgggaggcagaagcaggcggacgagcaaggccagccggcacagaggagccaggacagccagggcacacagagaaacccgccgaaaaaaaccacaaaaaaaaaaaaaaaaaaaaaaaaaaaaaaaaagcggaaaaaaagggggggcagaacacacggagcgcggaggcacagaggggccaccacacaggcacacgcacgggggaagcaccccgcaccaggacccgggacaggcagcccaggcgaagaagcccaccccgagcagcgggaacgaacccaggcccagcaagggcagcacaggccaccagaccccaccccacgggccacgagcccagcgcgaaccggccgaacccgacacgccaaccccagggcgagacaggaggccaccaagccagccaaaaaaagccaaagaaaggaaaggagcgagaaagggacacacagagaaaccgcaaaaaaaaagggaaaaagaaaaaagcaaagcggggggggggggggagaaacggggccgggccgggccggaaccacagaccaagcggccgaaccagagccaccgccaacacccccacccccgccaccgccccgaggcgagaaaggaggccaccagcccgacaggcgaaaacaggaggcacaggcaagaaagaagaacacaagaacccagcggcccagccgggccgcaggaggcaggacaagccaggaccgggacagcagaaacgcggcggaaccccgccgaggggcggagagaaaccgaccaagcccaagccagcccagcggagggagagccggggcagcccagggggcgccagggcaaagagagccaggaaaagaagcagggccccacccaccagaccagacaggcccagccccacaggccagaggcagagacccaaaggcagaccgccagcccaggaagcacgcgccccgacgaccagccgccgacgccaccacccccccccccgggggaagcccaccccccgaaggggaaacgaggcccaaaagaaaagaccccaaaggaagcacggggcggcagagcaagaaaaaaaagccacgccccacaggggaccacagagcaggcagggcccccgaagaagcgcgcgaggcggaggcggccacgggaaaggcgcgacacaaagcgacaccgagccccagggcacaggggaagaagaggagggaaccaacccgaaagccaaccgagaagcacacacacacacacacacacacacacacacacacacaccaacgaaaaaagaaaacagaaggagaggaaaagaaaaaaaaaccaaaaaagggggggggcgaaagccaacaaggcaaacagaaaggaaacagcagaaaaaacgaaacaccgacgaaagacagaccaaagagcaacaagccagccagcaaaacagcaggacagaggcaaaagggcgagcggaagagcacggccggagaggaccagggaccagcccccacgcagccacaagcaccgagaggcagccagggaacggacccggcagcagacacgcagagagaaacagggccagagcacagaacaagcaaagaagggaaagagacacaccgcagccaaccccaacaaggcagagagcggaaggaagccaaggacagcaggccagcccacacggcaagcagggaagaacccccccaagccacaggcccagcagaagggagccagagaaagggggggcaccacacaacccagagaccgaaccagagaccccgcaaccggaaccaagcacagcccaagacccaaccaagacagacagacaccaccccagccccagaagggcacggaagccccaacggagagcaccaaaaagcaaggacaaccaggaaagccacacaggggcaggacacacaggcaaaacaccagcacaaaaaaacaaaaccaaaaacgcgccaagggccaaagcaggcacagccggaagagccaccaggccagcacgagccaccgagacagaaccacaggaaccaagcggcgaacccagacgccccccagccagaaggcggaggcagaggggcacccgcccagcagcgcgagcgaaaggccacaggacacacccgggaagaacacagcaagggccgggagagaaaacaggagaaagcagcaggccacaagccccaagcccaccagaacacaagacacaaaaaaaaaaaggaaaaaaaaaagacaaaacacagaaaaaaaaacaagaaaaagggggaaaagcggccagggaagggcacaaggaggagggccgggagggggggccgggaggaagcacagggggggggcgagaccagccaagcccacccaggggaagagagccccgcgcccgacaagagagaacggccccagcaccagccgacggagcgccagccccaccgagaaagggcgaacccgaaccgaagccagccccaagaaaggccaaagaggcggccagggccacagcaaaaaacaagacaacaaaaaaaaagaaaaaaaaaaaacacacacacacacccagcaccaaaggcaggacaacggggaaccagccaggggacgacagccccagcccaaggcaccaggcaccaggggaaagacaacaccacaaaggaccggagcaaagccagcggcagcaaggagccagacagcagagcacacaggaacacacacacacacacacacacacacacacacaaaacgcacacacacaaaaaacacacacacaaacacacacaaacacacaacaacacccacggaagcaacaaaaaacaaaaaaaaacaaaaaaaaaacaaaaggaaaaacagaccaaaaaaaagaacaaagaggacaaaaaaaaagaaaaaccaacaaagacaccccggcggaccggcagacaaagcaccagccaaagccccggcgagacagggccggagccccggcgccggaaccaccgagaccaggcggcccgccaaagccaaggaaagcgacaaaagcacgagagggggaacacgggccaggggggacagcccagcaccggaggcagaggcaggcgaccgagcaaggccagcggcagggagccagggaacagagaaaagcgaccagaaaaacacccaaaaccaagagcagaagccggaacaccgcgcgcaggaagggagggacgacacacaagacaaaacacacaacgacaccagaaacccacaccaggcacgacccaaaaggagaaaaaacaaagcgccaaggcccccaggaaggcggaggaagcaggcacagccagagcggcccaggaagcacgccgcgccccggggcgcccagcacgcccggcgcgggcaccacaggggccaggaagcacgcaacaaagaaaggaagag

SEQ ID NO: 746 - RNA, 2254 nt, Mus musculus
gccacaaacagccgggagccaacccggaccccaaccggaaaaaaagccagaggaaaaaaagcgcggagcaagcagacacgagcccaagcaaaaacgccgcagaagcagagcaggggagggcggaaccagcagacaagaacaggggggaggggggagggggggacgggacacaagggaagccagggaagaaagccggagagcgacagcgacgagaggggcaagcagcaccgcccagacggaccccaggagcgaggggcccacaggggggagagaggcgaggaaaggccgagagaacagcggcgaaaaaacccccagagagcaggacgagaaagcaagaaggggagacccaggaagacacaggaggcagcccccggggagggagcggaagagagaagggcccgcgcaaagccccagcccgcgaccccacgcagagcgggggcagacccccccgaagcccagggcaggccccccggagccggaaggacggagacacgagggcccccccaccacccgacaccaggcagagggcaccgcaagggggccccagagcaaaaagacagcaaaaaggcgggaggcagccgaacgccgaaagagacccaacccgaccagaaacaggggaccaagacagcgcagagaagaacgggacgcaccgcggggacggggagcggggcggggagaacaacaacgcgaaggggcaacgcggggccccaggagcgggccccagccaagagcaggcaggacccgacagcgggcgaaccgaagccgacagggaagggaggaggaagaagccagaggcaccagcaagaacagaggccacggagccgggaagagaagcagaacgcgccagcgcacccggggccccccccaccgccgggcacacccagcccgccaggaacaaaccagaccaggcaaaccaaccggagaaggcagcccccaaaacggcagccgaaaccaaggcaaagagggggagggggcgggacggagagggggcaaaagcccaggcaagagcagaagacggagcacaggacggaaggcagaaggcgacagagacggcgggagggaacacaccaacacaagcccgagaaggaagccagaccacgccacagacagccgcccacagggagcgagaagcgaggaagggaggagccaggaagccggagaaagcacccccggcgggcccccaaaaaacccccagaaagcaacgaaggagaccagccagccccaagaagggaggacagccagccggcacggagacgaaccccggcagagggacaagcagggcgggcaggcagggagaccaaacgaaaaaaggcaagcaaagcagagggacgcggaacagacaccagaccaagacaaccaaaggacagcaaaggggcggcggcagaggccaaccaacacaagggggggagcacgcagcaaaggcaggcaggaaaggagaagcaaaagcacacacgaaggccacaacagaagacggcccaggcagcaggagagggcaagcccacacccacagggcaccacccaacaaggcacaccacccaacaaggccaaccccaaaaggccaccccgggccaagcaaacaaaccaccacaccagggcaccacagacacaggacaacacgagggcaggccggccccacaggacacgacagcgaagaacggggcccaggggaggagagaagaggaagagcggccgaaaccaaagcaagacgcaggccaggcaggccccagggcagaacagccgccggcacaggggaggcagaaaccacgaagggggcaaaaggaacaccagagaaagaccaggaggggcagagcgagcgaaaacaaggcaaagggcacagaggaaggggaagaaggggagccccgcaggccgcggggaaaggagcagagcaaggcagggaggggagacacaccaggcaggccagagcagagacaggaagcacaggggcagagaccggcagaggcccaaagaaaacagggggcacagaaagaagccacagggagaggggagaaaaggccagagcccagaaggcccagaagcgaggagcaacccaccaggaccccacacaccccaagcacgggaacagggcaggggccagccaccagcccagacacacaaacaagagccacaccaaaacagaaaccagaaggcacaccccaacacggcaagacagggccggagcccggcgcccggaaccaccgagaccaggcggccggaaccagaaacgcgcccgcccccaaggcgggaaaaggggcgc

SEQ ID NO: 747 - RNA, 17455 nt, Mus musculus
ccggacccaagacccacaggaaacggcccgcgccagcccaggggccgggaggaagggcagggaacgaccggcgaacaacgacagaaagccacaggacgggagaggcaaccgcagcccaagaccccacaggggacccgagaccacagaaaacagacaacaggacaaaagagcaaaaacagaaaaaaccaacagagaaagcagggcgggggcagcacagcagaggcacagcaaggaagcgggaagcacggaacaggaagggaggcgcaccacgcgggaacccggcgaccgggccccagggggaaggagagaaccaaccccaaggccccgaccccacaccccacacagggacagggcccacacacccccacaagccacacacccagggcgacagagaaggccgggggggcagaggcaagcaggcaggagagcggcggggggaacagccggggcggccgccacagcgagcagccccagagcgaacggagcgccggagcggggccccccgggacaggcagaacgaagggcgaacggcagggccacccccgaacacacacccaggcccggaccccaacccacccccccaccaagcccgaaaagagcgcagggaggagaaggcgggggaagcaagggagcaccaccaagaccagcaaccggagaacccggcaccacaggagaacacaaagagcacaacggccccgaggacggcacagcaggacacacacgcccccccccccccacacacacacaggaaacaaacaacaaaaaaaaaaaaaaaaacaaagaaaggacaccgcagcggacccccaggcccgagcgagcaagaccggccgcagagagcccgcccggagagcgaccgcccgccaccggagcagcgggcacgcacgccacaccagcaggacaaaaacggccggggccaccaagaaggagacacccaaggaccgacccacagacacaagggaacacacacacacacacacacacacacacacacaacacaacacacaccgcccaacaaaaccacacacacaaaaagacaaacaaacacaaacaacaacacacaacaacacaaacacacacacaacacaaacacacacagacaaaaacacaaacacaaacaacaacacacaacaacacaaacacacaccacaaacaaagccacaacacacagacagccagcacccacacaccgagcaagaccccaacgcccagcgggaggccacgccgagcccgcaacagcggcgggccccagaggccacgccaccccccaccgccagacaggcgccacgccaccgccaggccccgcccgagcaacacacgcgacaccccaaaaggccggaaggaagacacaaagacagcagagaggaaccgaagcaaggggacgaaggggagaaccacaccacgcgcccccccagggcacgggcacccccaaggaccccccaacaaccaccaacacagcaacaccaggcagacgaaaccgcccagcaccgccccaaaggcacccacgacccgaccagagaccgcccccagacacaaccgcaagagcaggcaggcagccgagcaccacccaccggaccaagcacgcacgagcagcaggacgaccccacgaccaccccagacccccgccgccccaccccgcacaacaaggccacaccgccgccgccggggggacccgcagccgaagggcagcccaccgggccagcgggaggacgagaagcacgaaccccccagccaccccgagccagaggggcaccgacccagcaccggcaccggcagagacgggaaggacagaggaggcccacagggcaggaacaggagacccggggcacccccagagccaaagagaggaaaaaaaggagcaagagcaggcacagacaagggagcaccagaagcccgggacaaagggcccccccgcccccaagacagagagggggggacgcaaggcacaaccgcccccagcaccgggggccgcagaaaggcgacacacagagcgggcacaacaaaggggacagaccacacagaaccagcagagaaaacgaagcgcccacaccccgacaacgccagaggggagacgaggcaggcagaggcagagagagaggccaaggggcagagagacagaacagggcccggcccccacccggccacagggacagcagcaaagggacagagcacagacggaaaggaacagcgaacagcagggggagggaggggcaggaaaaggggggaaaaaagaggaacaaagacagaagccgggcacaggccgggagcccccccccccccccccccccccccccccccccgagaagcagcagggagcagggggccaggccagcacccaggcccaaaacccgggacagcagcggcgacaccgggcgcacagaaccaaagggaggaggccggccagggccaaagcagcgcagccacagagcaacaacagaagaaaacacccccccccccccccccagagccgcgccccaaaacccgcggccccacccgccaccccagaggaccacaccgcccacgaccacggagaacggcagagcccaggcgagggcgggacccagcccgaggcacaccagcacccacaaggggccccagcacggaccaccagagccacaaacgcccggacgaccccagcccccacgggacaaaggccggacaacagagaggagaaaaacggccaccgccccagcccgaccccgaggccacaccgcagaggagggaggccgcagaaggggaggaaggaagaccgaacagaccccgccccagggccgggcccggggagagagcccagaacgagcagagggaaaccgggcccccgccagccaggccccagccagccaggcaaccccacaccccagaccagcgcaccaccacaggcagggacgaacgggccagaccgcccgagacggccccgagccaagggccccccccccacaagaccagacccgggcagaaccagggcacccacggagccccacccgagcccggccggccagagacacggggaagcagggggccgcagggagaccagagacccagcagaggcagcgccccgaaggggggggggggggggggggggcgcacaggagggccagccaaaacaccccgcgacgcacgagaaggacacgccaacaccaggcgggccaggccaagaaaaaggaacaggccaccggaggccaccgcgcgcagagccaccaacccaaccccgccaggcccggaacacagcacaaaaaggagccccagacgcccgaggacggccccgaggaaggagggccgagacaaccccacaagacgaccagagaggagacccagccacaacacgggagccagcaagcccacgagcacacggccagacaccgccccaccaccgcccccaaagggacccacagacacagacccacccggcaggggccgcccaccggagcaggcagagcggcaagagccgcaggcggccagagccgcaaccggcagaggcaaaacagagcccacacagacaggaaaggcgggccagagaggcaagcaacgcccccacacacagcccaaaagaaccaacccgacaaaaaacaggccaaacccagacgcgccagaaagcaaccagcgcgccaaacacgaccgcacaaaagcacaaagcgcgacagaagcggacacacacagaaagcgcaccccaggcgagccaaaccaggcaaaccaacgcaacgcccccaagcgcggggagcccgagcaaccagaagggaagacaggcaagccagcggaaggacacccaagaagaaagcccagagcaaacccaacggaagaaaggcagggagcgggcccaggagaagcccgaggaaaggagagccagagacccagcagaggccagccgcgccgcaggcaggccggagaggcgagagccacagagagccggaccagaagcagacaccagagcgagccagaaacccaggcgcagcggagagagggagcagacagaagacccaagcaaaagcagccccgaagccacggccgagacgaaagcggggaaacccccggcccaagcaccagcggaccaaccggggggccgcaccccgggccggccacaacaaggacaacacaacagacgagccagagcaccagggagaacgggggggccgcccgccgacccaggacacggcagacaccgagaagggaaggcccagacgagacacacacacaccacaccccaccgcgcgcagcccaaccccacacccggcaaccacgagccccgaaacaccgcccccaggcgccagccagagagcagagccccaagcaccaggacagaccgcaacaggaccaggcaacacgggcccagcagaaggggcaggacacaaaggcccaggcacccaaaacgaaaagccacaaaaggaaggcgccaccgcaacccagcacagggaggaagaggcaggaagaccgcagcaaggcacgcgcgaaaacaagcaggccaacggcaacgagcacacgggaaccaaggcagcagggcaccgcacgaagcagaccaagaagcaagggggaggaaagggaggcacacccaggcgcacaccaaaggaagcaggacgggaccaagcaggcaggaagcaggagcgagcagaagccaggagggagcacggcgcccccgggccagccgcccaagaacccaagacaaccagcccagagaggcccacccacaaggggcccccccgacacaagagaaaagccacagggccaggaggcacccaacgaagcccccggaaacccagcggcaaggacacaaaacagccaaacacaagaaagggagaaaaaaacaaaccgaagcgcccaccccaaaacggcacacacacacacacacacacacacacacacacacacacacacacacacgaacagagaaacacacaacccaacccggagcagcgcacagaaagccacagcacacaggggccaccggcccccccagaggaggaaggggaggaccggggccaaagacagggagaggggaagagaaagaaacgagcaggaagggagagagaccagggagacaagcaaacgagagagagacacgcagggaggcgggccgggggccaggagaaggaacacagaggcggccccccaccagcccagcccacaggaaagaaggaaggagccgaaagcacaaggcgcgaggcaggaggaacaaaagaaacagcacaggcgaccccaagggcaagagacagagcccgcccgccagcaagccagggcgggcccccagagcggggaggggggcccgggagccacacacggccaggagacgcaaagaggggacagaggccaggggagggaggcgaggaaaacgcaccagacaacaaagccaggaagacgcgacccgcgcccgccaccccagcgccgcccaggaccggggcacggccagaagaacgccagggacaagaaacaaagcaccgggagccccaggcagcggccgccacagagaacaaggaaaagcaaggccggagaagagggaaggaccaagggaggaggaaggagccagagccgcagcgagggcagagggggggggagacgcacaccagaacggcccacgggcgggccaggacgggaggagcgcagaaaggaacagggcgaaccggggccggggagcgagaggaaaacagaagaccgaggggccagcgggagccaggggagacagccgacacccggagggacaaagaagacagacacggagaccagcaagaccacggagccgccaccaccaaagcagagacagccagcacccggacacccagccccaccaacagccggaagccccaccaccaccaccacaagcgcaggccccaacgggacaaagggccccccccgccccaggagcgacagaaagcggaaggagcaagagcccccccccccccccgcgcgcagacaccccccacccagcccagccccacaccccagcaaaacccaaaaccaagaagggcaagcagcaaaagccccggccaggcggggacgaggagcagcgagcaagggccgaggggggcgagcaggggaggcagggggacacagcagagcgaccagagcgcgacacagagggaccgaaacgcgcggaggcagggggagagagccgggggggaagggggggagcacgggaacgacagcaccgccacaaagaagggacgggcgagcaaggggggggcccaggcggcccggaccacgagaggagcggggaggaggcgggccgagggaggggacccagaggccgcccgggaagggaagggggggagaccagagcgaggggcgagcgggagccgccggccgggcaggaggagcgggcgggaggagcccagcacacacccccagcgcccgcagcaaggccagagcagaggggggggagcggcacccaggggaacgcagcaggagggaaaaacaaacaaggcgcaacccccccccaagcaggccccacgagcagcggagagaagggggccagacaggggacacacaccaccaacgggaccgcccccagcccggcccggaagggaagagcagggcagggggagagcaccggaagacaggccggaagcacagcacacgacgaggagaacaagcagcccgccccaaacaaagacacacacaaggcagagcacagggccccacaccgaggccagaacacaggaaaaccccaaaagccacagaaaaggacacagccagacccgccacgagggccgcccccccgacgagacaggcagacagacaagacagacgaccgccggagcaggccccagggaggggagcccaacagagagcgcccacacccccccccaaggcaagagccacagagaccccggcaaggggaagggaccagaaggacgacaggcagcccacccgcccgaaccgcaagagaaaggaagaaaaccaggcaggccgggggaggcagagaggggcaaggaagggaggggccggcaggggggcgcggggaggaaccgcaccacggcgaggaggaacacagaggccccgagaaaaaagcccagggaccagggcccgcaccagacacaacacccgcccaggcccccccggggggggcggggggggcagagggggcggccaggccaaagcggccccgacaacaggcccagaaggcgcccacccagccccaggggcggcagcaggcgacggggagccaccccacacgaaccggagggagccccgggaccccaccccaaagggcgcgcccccgggagcccaggcccggggccggaacaaagccagcacccccaggccaagcacccggggcaacacggcagaagagcggcaacccagggcagccgaacgaacccagggagccggccaggaggagcgcgcccaccaaaagggcaggcccaggcagcaccccccaccggggcgcacacagaaggcagaagaggacagacacgccgggagccggcgagggcagaggaagcacggcgggggaaggaacggcccccccgccagcccgagccagcccccagacccccagaaagcccccccgggcccagcacgccccccacacccggcgcagacgccgcggacaaacacccaccagccgggaggcgccgggccccagggagaaaccgacggcccggcagagggaggacgggcgggaagggggcgggcgggccagcaaaccacaagaggagggcgggggacaacaggggagacacgcgccgggccaagcggcagggacagaaggggagccaaggagggcgaacagaagggggaggggacacagccgaaggggacagcaaggagcaagcaggaagcggggccacaggggggggcgcgagacagacagagcccaaccaagcagggcggaaccacaaacagccaaagaaaacgaaccgacccacgccccaccccgggaaacacagacgccaggcggaccggcgggaacaaacccaaggccgcacagcaggcaagaaccaccaacgggacacacggcccggggggagcacgaaagaccaaccccgccaacacccagaacaccacgccacaaaaacgaagggaacaagccaaacagaggcaacacaaccagggcccagggacagaagaggacaaggggagagagcggcgagagcccaagcccaggcaggggcgaggaaggcagggcggagaagagccacacacgcagcgcaggaagaaaggcagacgggcccagacgggcaggccaggaaggcaaaaggccacccacagaacccgacccggaaacccaggacccgggagagagccaacacagcacgcagcaagcgccacacagggccaaagcaagacaagaagacagacagaaaacacgcaggggcagggaggccaggggcggcgccaacaacaaaagcccgggggccccagacacacaaaccagaccgggggagccgaaacccagcccaacacaagaggagacagccgggcaaggacaggccaaaaagaagaagaagaagaagaagaagaagaagaagaagaagaagagcaccacacccaaaggacgcagcacacagccccagaaccaagcaaacgcacccaggggaccaggcacaaccacggcagaaaagaagagaaaggacaggaaccacgggcagacaagaaccgagaaacacggggccaagcagagcaagagggggcacagagggacacgaaagcaccggggcccccggcaagacagcaagcccaccccaggaagcagcccaggggggacagccgcacccaccaagaaggaggagaaggcacccaagggaggccaggcggacagcaagaagcagaagagagggggccagcaccaggaggcagaggcaggagaagcacaagcaagaccaggcagcccaacagagccaggccagccaagcaaacagcaagacacaccgagaaggaggggagaagagaggaagaggggggggggggggggacaggggaggaggccgcaggagggaggagggagggcggagacagaagacagaagccagacaagccacccgcccccaacagagcaaggacaacccaggcaccaagagccccgaaccagcagccaccaagcaaggagcaacaggccaggccagcgcgcaagcgcgggaaggaacagcgagccagagagggcgccccccacggagcggaccccaaaggggaaaagcaaaagaggaagccgaaacaccaccagccagggcagcggcaaccgggagcagaggggggggggggggacaacccgacaaccgaaagggaacgaggaccccacacacacaggaccagaaaagcaaagcaagaaaggcgaaggcagcccgcaacagggggccgacagaaggggggccgcggaagcgggcaagaggagaaggggggcggcaggggaacacccccgccgccagcacagaaccgaaaaaggagagagcccccgcaagaaaacaacagaacaaaacaaacagagaaggggaaccccccgccagcccgcgagaaagaaaaggaagccccgccggggcgaccgcgcaccagcgggacagaggcgcaagccagcaagccggcacccacaccaccccggggcgcggccccgcaacgagcggcagcacccaagagaggacacagccaacacgaggcagcgaagcccgggaaaagcgaaggccagggccaggaggaaaggaaaaacaagcgaagagaaaacaagggccggaaagaccccagagacaccagggccccagccccacccaccaagccagaacacccacacacgaaccagaaaaggggagcccccccccccccgcaaagccacccgcccgagccggggcgagaccggacaaagcagacagccacagggccccggaacaagaacccccaccacccagaccccacggccagcccagaagcgggaacgggcaaaggacgacgacagaggacgcccccggacaaaggcgaggccaaaaggccgggcaccaacaagcccacaagacaggcaccgcacaggccgcccgccaacagaaccaaggccacggcccgcgaaagccagcaaaaggaagcgggcgggcacagggagcggagcgggagaaagacccacgaggcaaagccaggaaagggaaggacagggcgcaccaggccgaccgcccggggaaagcagcggccccagggccgagagaaccccagaggcggaccgggagagcgaggcggcgggcaagcgccccccacgcccacggccaccgccaggcccgcacgaggcccggggggcagcgaagaagagccacaccgagccccggcagccgaggccagaggcagaggcaaggagggggcccgaagaccaggccgggcagggccgaggcccgcacaaccccagcaccccagccgaggccgcgaaccagccagcaacaaacccaccccggaccacaaagcacaagccagcccaaacccgccccccccaaagcgcggccccacgcgagggaaaacggccccgggcaaagggaagccaccggacccacccgccgcagcggagagcacagaggcgggaaggcccgccgcaagaccccaaaggccaggcagccgaggcagcccccgcccgaggccggacccaggaccgcaagaccaagcaaaccacccggaagcggccaaccccggagcccgaccggaacgcagaaaaaaaaaaagcggcccacaccaagagagccacgcccgccccagcgcggaagaggggcaccacccaccagcggccaggcagacagggcaagccaagccccgaacccgccggcccccagagagcccaagccagcaagacccagccgcagaaaaccccgaccccaggccccccggggaccccgacaaaggcagaaaggccgcaggggggccagacgccacagcggccccgggccgggccccccaacggccccacccgagcgaccagggcaccccaggaagccgcagaacgaacaaggccgaacagcaaccccgcccgcgagcgaaagaacaccccgggaacgggaagaagggcggccagggagggcagggcagggcaccacggggggcgggcaccgcagcaaaagacgccggagaccacagaggcaggcagccacgggccgaggagacccgggacacagaaaaagcagggggcgacaacagaaaacaaaaaaagaaaaacaaaaaaaggggggggagacaggggaaaaccagccggcccaaacacaccgcccgccgccaaaacagaaaaaagagcacccccaccacccagcggaaacaagaagcgggggaggggcggcgcagagaccacaccaccccagcaccaagaaaagaaacaaaacacgaaaaaaaaaaaacaggaagcagccccaaggggccggggccaggacccccgcaggaccgccccaagggcacagcgcacccacagcccaccaagcccacccaacaaaggggccaaggcacacccagcagggccgggacggggcccgggagaaccggcagccacccaccccaacgcgggggcaccaccagccacagggcaggcaggccccagggcaccacaaacccacacagccaaaaacagaaaaaggaaagggaaccccgaagaccaagggggggggggcaggggggcagagcaggacaagcgaggcgaaggccaagcagcgggaaaagcggaggccaggggcgggaccacccccccccgccaagcgaccacaccccccccccagggcgaccagccccaaacagcaggccgccaggccccgcccaagaacagcccagagccgcggagacaccggccgccaggcccagaagcaacgagcccgccgcacccaccggagggcagcgcgccccaaggggccaagcccgcacaagcgagaagagaggggagcgggcaaggagcgccgggaacagcacacaaccaggccaggcccaaagagggggggggggggcagggaccaagcaagaccaggcccccacgaaaaggggaaacacccacacagagggaggaaccaagaccaccacccgcaggcaggggcaggagcagggcagaaagccggcgcacccggggcacaccaacgaggcccgagcccaggccgacccaaccccggccacccccaggggcgggaacagaaacacaccacccccagaaccacaaaaaagcaagaagagaccgggaggaagaaaagaacggcgggggagcaggaagaaaacacacccagaaccccaggccaggacagaggggaacggcgggggggggggaggggaggggccccccaggccagcaggcccagcccccccagcacccccaggagagcagacggcccagcaggacaccccagccccaaaccccccaggaagcggcgggcagcccggggagcaggcgccagcccagcgaaaccgcccaccgggccacgcgaagagacccaacccaaaggccaccagggcgaaacaaaaagagggcccaggagaggccccggggggggaggggagcccaggcggcccccacccacccaacagcgagcaggccacgggccacgaacgggacaaaagcggagacacccagcagaggggcaggccggcaggcaaggccccccacccccacccccacccccacccccgggccaacccaggacaccagaaaagcaaaggaaaaaaaagaggggaccaggacccggcggaggcaacgaagggcggaggcggcaagagcgcccaccgagcccccacccagccgaaagagaagaaccgcgagcgaggacaaagaaggcaccccagacacagcgagggcagcccgggggaaacgagcagccagcaggccgccccccacacccgagccgcagccggcccaggcccgcacaggacacccagggaggccccccagccgacccacacagggcggcccccccaccgcgccgacgagcgggccgagaggccggccccagcccgaggccccagaggaccacacagaagcaacgagccaacggacaaaccgagagggagccagaagagcgaccaacaggaggaacgcccggagagggcgcaggcccaggaagccaccagaaaggggaacaaagccaagcgacaaaaccagccaggccacagcgagccaccccagccccaaggccaaaacaagagaaaggccacccaccagaccccgacgcagaacgccgaggcagggagcaaaccaaagagaccggggcgggagaggccaggggaagagcacccgacgccccgaaggccagagcaaacccagcaaccacaggggccacaaccaccgaacaagacgacgcccccggaggcgaagacagcacaagacacaaaaaaaaaacaaaaaaaaaaaaaaaaagaggccgaccgccgggaaacgaggggcacggggggggggggggggggggggagggccagaagaaaaacaagggaaaccacccaggaagaacaggaacgacaggcgacaagaaagagggccaacacaagccaccaccagccaacaaggccaaagggccccagagaagaagagcgggccccgcgacagcagggagccacacaagccgagcaccacaccccccgagggcgggcaagggcaaggagacccagcacgccagggaggagcagaggggggcggcggccgcacccccccaagagacggaacccacggccaagcaaagaacacagaacacggacagccccccagccaaggaaggacagcaccaagccacagccagagggggcaagccaaagcacaagcacagcgcgggacagccgaggacagagaagggggccgaagggagccgacaaccccaaccgccacgacagaggccaggcccagaggcccggggacaaaagggagcaaagggcacacggaggagaggggggagcagaccaaacgaccacaggaagcccagcgcccggggacccagcaaggagaggggcggcacaagacgagaaccagaaagaaagacccgcgcccagagcaacgcgccgcaaacacacggcggcgccgcggcaggaggagccggggaaggaaggcagagacccagggcccccagccaggccaccggaccagacgggaggaaccgaccagagaagggaaaccccaccgagcacagagccgaagaccccagagcaggcccgggggggacacaggaagaaaggaacaaacaaaccccccagccaggacagccagaagaccaagaagaggcacccccagaccaggagacccacggagagagggaagaagaaccccaaggcccaaaccccggaagggggccagaggccacgaagaggcagggaaggcgggccaccccagacaaagcgggccccagcgaccaaacaagcccgaggagggagccaggaaggagaccacggccggggcccagggaaagagggacagagagaccggccagcccgcaaacagcggcgccaacaaaagggcagccaaaaaggccaaggggaaaagcccggaaggaagggggcgaaaaggcccaggaaggcagccccaaaggcaggcaggccggccccgcccagcaccaccagccccagagcggaccacccagccgccccccccggccccgcagaccggcaagcagggacagacccggccgccgcaaggagaccgcgccccggccacagcaccagcacacagggcccaagcgggcggagccaaggaagaagagggaaggggagcagacacaacaggagagggccaccaaacaccgggcccccgccacccccgcccgcccccccccccaccgggaaccaggccacgcccagggccaccagagaggccagccccgacagacacgcgagcacgcaacggacggcgagagcagaaggaccagacaagaaccagaccgggcaagggagaaagcaaagaggcaaaagccagggggaagcagaagggggcgcccgggagggacacggcggaagcacaaaaggccgggagaaagacagcccgaggccagcccaacccgaaaacagcgaaccgcagccagccaagaccagacaaacaccaaccaccagggccaagaggggaaggggggcacagccagaaggcccggaagcacagggacaagggcacccccgaagccgggcacacgaccggggagcgcgaggagcaccccgaaggcacgccccacaccagcccccaagaacccccaggggcccgcacccgagagccgcccccaccccgcgaagcacgcaggagcaagagcccagggagacggagccgggacaccaccagcggcgggggaggggggggcccaggcgggaaagcaaagaagcaagcgggaggcagcaccccaaacaggaacagccagaggggggacagagccccaccaagagaagcccggaaggcagaaacagaccccgagcacgaacccgcccacaagccggggcacagagaccggaaggaccggccaaggcacccaagaagcaggcccccagggcagagaggggcgcgaggccaaggaggaaagacggagaggaaggagcccccagcccccaccgaccgccccagggccaccccaccaccagcaccccaaaggaccaccccccggggcccagaaaaagagggcccggagaaggccacgaagaccaacaagggccggcgcaggcggagcccaagaaaggggaaaggcccaagccaaagcaccgcacacccgaaccaaccacggccgaagcaaagccaaaggcaccaaaaccggccgccccagggagaagggggaagcgggggcacccaaagagccgggggaggggggggggagggggaaggagagggaagaccgggagcgcccgcacccgcgcccgacccgcacacgggcggcacacacgggcgccagagcgcggagaagcacccccccccacccacccagccgccgaaagcgaggcgcaccccccccccagccagggaagaaagggcggagcggcgacccccccagccacggccccacacccgggcacacacccccaaagagcagcagcagcagccccggcgcaccaaagggagaggacggaacacggcccacaagacagaggcaagacaggggcgagaaaggcggccaaggcacaggccagaggcaagaaggacccaggagcacccaggaggagcccagcagcagggagcccaagagcaagcccacggcccgaaccagggccagcccaggagcccaaagccgggcccccgccgcccaccccagacaagcgccgggcagccacgggcacagaccccacccagccgcggccccgcccggcccccccccgggaaggggacccaccacccgcggagggacagcaagccccaagggggaagacccccccggaagcccagaacaagccagcagaaaggagcgcgcgcccaaagcaacccaaccacggcgccccagcaccgcggccggggcaggggacaccgcgcaccgacacacagccagcaagacacaggcccgggaggggcccggcaagagcacgcgccacagaaacccaggccccccacaaccacaggggcccacaaccacgaacccagcaaggggcccgacagggcaccaggcacaacagacaacaacaggcaaaacacacaacacagaaaaagaaaaaaacaaaacaaaaaaaaacaccggcgagacagggccggagcccggcgccggaaccacgagaccaggcggcccgaaccagaaaccgccgcccgcccccaaggcgggaaaaggcaggccaccacgcccggccaaaaaaaaaaaagaaaaacaagaagaaagaaacaaggcagaaagggacaggcccaagggacaagcggaaaggacagaaggagggccggaccgcaccgagaggaaggccgcggggcacgccaccggaccccccgggcaagaccccacccgcgccacacgagcagaagaccaagaaggaaccacaaaggccggccccacccaggaacagagggcacagacagaccaagcaaccccggcgaacagcccacagagccagccaggagaggcaagggaaagacgggcgcaagacagccgacaggagccgcggcccaccggaaccgggccgaaagggcacccagagggcggagggcgggcccacccaggaaggacggaacacacaggacccaaacccccccgaagacagccaagccccccccagggagccccccgccccccccacgagggacaccgagccccgggccacacgagcccccccgaacccgcgggccagggcgggaagagaagacccaccccgcggcggggagacccagccagggaccgcgggggacagccggagcagagcccgcacccgcaacaggcgagcggggacggacacaggccggcacggcccagcgcgcccagggcgcacaaacccccgacgcccgcgcccaggaaccccccacgacacccgaagccccgaccggcggggcacaccgccccccccaccccccccgcaacccgggccgaccgcgacccccgcgccccccgcggcagcccgagccggcaccgcccccaccccccacccccaaggcagaagaggggcgggccccccaagccccaaagcc

SEQ ID NO: 748 - RNA, 16011 nt, Mus musculus
gaagacagcaaagacaaaggcagggagaccggccgacagagagccgggaagcacccggacacacggacagagacgggaaagcaagaaaacaccgcaagacccaaaccgcacccaccacccaccccaccggggaaaaaagagaaggaaggacccagcccacgggggggccaccccaggcagaggcaaggaagaaagcaagcgagcaagccagaggagcaagccagcagcagcaccccacagcgccacccgccccggcccgccgcacgcccgagcccagaggcagggggaaggcaagcaaacaccaccacaacgcggccgggacacaaaaagagccaagcccagcacggggaggcagaggcaggggccggaggaggccagccggcaaaaggagcaagacagccaggacgcaaacagaccccacccagcccccaggaaaacagagcaggcagcacacagggagagggaggggagaggaagggagacgaagaggcggcacaggcaagcacgcccaaagagcaggcccggaggcgcagaccagaacggagccaccaaggggcaggaacaaaccccagccccagaagagcagcgggccaacgcgagccacccaaacgacaggggaacaggggccccgcgccaggcagccacaagagaagcaaaaccgaaaagcaggcagcgaaacgcgagccaggcaggcgggaccaagacaagcccgaggccacaggacaccgcagcagaaccaagcacgggcaaaagaaacaaaccgggaggggaacgagcccacagggcgaaagagaaccgaaagaaggcaaccaggccaaccgggcacgaaacaagaccgccaaagaacaaacaaagggaacaggaaagcccggaggaggagaaggaggaggagaagggacagaaaagccgcagggagggagcaagggcacccaggagagagccacacacccacaggcaccggggcgcaaccaaaagcaggcgagagacagacagacacacacacagacaagagacacacgagagaacacacaggcaacccacaaaaagaaaaaaccagacgcagagaagcagcagagcaaaggcccaggaccaggagaaaaccaggagccaccaaaaaccgaaaaagacagaaggaaagccgaccaagaggcccccgaccccccgggggccgggcacgagggcggcgcgggcgcacacaaacacacacacaacacacacacacacagccaacacacggggcgcacacacacacacagcaaacacaagggcgcacacacacacacacacagccaacacacacacacaagccaaacacggggcgcacacacacacacacacacagccaacacacacaagccaacacacggggcgcacacacacagccaacacacggggcgcacaacacacacacaacacagccaacacaggggcggcacacacacacacaccacacacaacgaacacacacaaacagcagcaaaaaaagagcaacaggggcagaaaagagacgaggggccagaccaagcacaaacggggagaaaaacaaagaaaggggaaaaaggcccgacgagagggggcagagcagaaagagacaaacacagcaaaaggcacaaacggggaggagagagaccagcaaaagaacaccgccagcaccacagggaaccaccccagagccggcagggcaccaaggcagcccgacgcagaccacagaggccagaagaagacgcacacccggaacggcaagacagggagcagccagggggcaggaacgaaccaagccgcaagagcagcaggccaacagaagccccccagccccccccggagcaaaacaaacagcacgggggcccaaacccccccaaaggcaaggccagcccacagagcaaccgccgcaacgacaccggccccaaccccccacccagggaccaagacggccgaaaagagaaacaacagcaagaacagggagacgaagagggagagaccccggagagggacaggggcagaaccacaaacagggcgaaccaaaccggccgcaagggcagccacgaagcaccgaggaacacccacgaacaccccagcggaggcagacgggaggaaaaaaaaaccggaaagcaaaagaagaagcggaggacgaaagcccccacggcccaaaaaggagcaaggaaagcaaggaaccagaaggcagagcccagggagaaggaagccacaaggcaagaccgaggcaagcccgaacccccaggcgggaggagaacaaggaccagcgcccacagccgcgaaagaccccaaggaagacgaccccaacggagccagggcaccccgggcccccaaggccgcaggcacgggcacagaagagaaaagaaacccaaaaccagacaaagggaagagaagggacaggaagggccagagaaaggcgcgcacaagccgagaccgaaaccaaccgacacccaccggggaaggaaagaacgacccggggccgaccacacacaaaaacaagccggaaggagaacagggaaagaaaaccaaagggcaagaggggggggggcaggggggggggggaaacgccgaaagagagcaccaacccgggcggcccaagaggcagcgggaaccgacacggccaagccccaggccggcgcgagcgagaaaggcagagcagcaagcacgccaagcacaccccgacagaggcccaggcggccccacacacggccaagcacaccccaccagccgagggccgagccaaggccggccgccgccacaacaggccaaaacccaccccagcgagacagagacaccagcagacaaagccccaagcacagagcaacaacaggaccaagccagagaaaagaagaacaagcaggcagaagcgacaccccacccagcaggggagaagaggcaacagaggggagccagccagccggcacacagagagccaccccggccggacaagagcgccagaccagccaaaccgcaaggagacccgcgaaagaaacaagaaaagaaacacccaccaccgccaaaggagagccacccgggccggagggaaacggaggcacaaggcagaaagagcccaaccagagagggcagagccacgcgagccaagccccacagggaggagacacacaagcgccggccagaaggcaggcagacacccagccggggggccaccaagcgccaggcaaaccagaacggggagcgagaacaaaggaaagaaagccagccaggccagaaccaagggcaggacaggagagaggccagccgagagcacggcgcccgagaggaccgggggccccgcaccacaggcagcccaaccaccaacacagccaagggaccgacacccaaaaacagaaagagacagagggccagacaccagagacacagacccaacagagaggagccaccaggggcgggaagaaccaggacccggaagagcagcaggccaaccacgagccagcccagacccccaggccgggcccaagacacgagcaggggcacaacaacaacaacccaacaacacacaaacacccaacaaaaaaaaaggaaccaaaaaacaaaacccaacaaacaaaacaacccacacaacccaaggggagagaaggaacagcccgcgccagacggaccgccccagccccaagcccccaaccccagcccccagcccccagcccccagcccccgcccccgcccccgcccccgcccccgcccccgcccccgcccccgcccccgcccccgcccccgcccccgcccccagcccccagccccccggcccggcccacacccccccccgccccagcgcgccccacacccaggcggggccaaacaggggggcccccccccccaacaccacacccaagagcagccaagccccacccacgccagcagccccacagacagcccggaggacagacgcccggcccaggcccgagaggaggccaaaggccacgcccaggggcgccccggggcgaaccacagagaccagcaggagagcaccacacacgggggaggggcaaggaggcgccccccggggagaaggaggggcacagggcggcgaccccacagggcccgcgccgccaaggcgcaagagggcaaacaccccaccgcaagcccagcaacaaggacacccgaccaacagaagaaacagacgagaccagaaccacaaaaaccagaagagccagggggggcacgccgcaccaacgggaccggaaagcaagccaaccagccggcacacaagaccgcacagaagaagaagaagaagaagaagaagaagaagaagaagaagaacagaagacagggaacccaaacacccaaaagcaggccaaaaaaaaaaggggcaggggggagggcacaagacccagcaccaagaggcagaggaagcagaccggagggaggccagccggcacagaggaacagaagagccagggcacaagaaaaacacgcccagaaaaaaaagggggagggggagccagagagaaacgacaaaaaaaaacgaaccaaccaccacaaacgaaaagaccacgaaccagcaaccggaggcaccaaagccacgcagcaggggggcccgcggggggaggggcaacggagggccccacggaccaggccgacagggggggggggaggacaagaagacgggccgcagcggacaccagggaggaacaggcagcaagaagcagccgcgcccccgcacaagacgggaagcgagagggcgggcagggcagggcaaggcacagcaggacagggcaacgggcgcagggggggggcaacggacgcaggggggggcacaaggggcagcaggggaggacagcggggcagggggggggccaggggcagagccgggagggcagagggagacggccccaacacccaccgggagaggcgccaagcccgagacccagagcgccagcagcacagccagagcccgagcacccacccaaacccccaggcaggacagcgggccccaggggccagagacacaggcagacccaccccccaccggaagcaaggccaccaacgagcaaccgcccggcaccacccacacgcccggcgcgggggggggggaaggcagggcggggggcggccgggacacagccgcccaacggggcaagaaggagacaaaagcgacgagggaccgaggcccacagagcgaacgccaccacccgccagcccaggcacacgccgggcacaggccacagcgaacaagaagaacaacccaaaccccccgggccccagacggaggagcaccgacggaccccccccgggggccacgggaaggccacaagccggaggagcagagagagcaccacccacagaagcgaggcacgggcaaaccagaacccggccccaagaggccccccagcaagagccaggccgggaacccagcacacagaaagagaggcaaaagaaaggagcagggacacagagccagcagaagccagcagggaaagaagggggccagcaggggcgagccagcccaagaccagaggggagaaaagaaccaccccacaggcgccgaccacacgcaacagagcaggggacacacagcacccccccacccacacccccacacacaaacacaaaggaaacgaaggcacggggaacaaaccgaagccaggccacgacaccgaacggacaaccggaaaccacaggcggagagagcagggacagcccgagaaggcccaagcgaaggggaacaaagacggacacaaggcccccaacggagggagcaaagaagcacagcacagagagccccgagagccacaccccagcaccacccagccacaacgcagagcacacccggacccaccgcccacaccaacaaaacaaaaaaaaaaaggcaaaccaggcaaagacggcaacccagccgccaggcccgcccaagaagcagagaaaaaggccaacacggaagcacaaacgaaccagcaccacagggagagggagagggccgaaggcaaggcaccggcacagagcaagcaccggcgagccaagaagccagcacagcaacgaagccaacacacagcacaaagcagggaggacaggaagcaaggacggaaggaacggagagaggcccggcagccagcgcagggcgaaagaaccaggccagcccagaacaacaggggcacaaccacccacgaccaagcaaggggacaaaacaccccccaccccaacccagaccgggggacacaggcaccaggcaaaacaaacaaaaagagaagcaaaagaaaaaacaagggccagagagaggcccaaccaaaaaaaagaaaaaaacgagaaccagcacagacaggccgcaaaccacaggccagagaccggagaaaggacagagcacccagcgccaccgcccccccccgagccccaccgccgccaccaagcaggggccccaagggaacccccagcacggagcccaccacaccagacacaaggagaaagaacaaaagaaccggaggcagaacccagagcagccaggggcaagcggggccggcggcaggccgagccccaggacagggagaacccggaggcgagggggaacagcggccggaacaggaagggggaagaggaaaccccaggacagggcccaggcccgaggagagggagagggggggggggggggacagcagccagaaaagcaggccgcagcggacggagaaaggggaacccaacgaacacgggaaacagaaacggcgggggcagacaggcaagagggggggcggggaggcggggagcaagggcggcggcggcggagacagccaggaagggcgcccgaggaaaaggcaacaccacaggccgaccagaagcgggcaggggagcggggggggggggcgcgccagagaggacaaagggcaaggacccaccagagacagacagagcccacaaaccgaagcaaacgaccaacaagggccaggccggggccccccgaccccgaccccgccccagaggaacagacacacagcaccaccaccagccacaaaggggcggggaccaccacgagccacgcccagcacgggagggacagggcaagagccaggcggcccaacccacaggagccaaggccaaccggaaagccgccccagggccggaaacaggggcgcaccacacccagcccggggagggaacggccccggggcggacgccccggggccccccaaagcagcagcgcccaaaggccccaggacccaggcgagccagaccggcgcgcgccaggggaaggggaaacccagcaccagggggcagacaaaccaagcaaaggagcagggcagggaaaaggaaacgacaagaggagggcaaagacgccccggcggagaccacgcccggggggagagaaagggagaagaacccagagccaagccggaaggagggccccgacccaggcaagcccccccccagggccgcaggagacaaagcccagagaagaagcacgcgggggccggagcgcaagggagccccccccgcccccgccgcagccacgcccaagccgccccggggcccacggagagagaaaagccccccaccgggaagccaaccgagcacagccagagaagccagcacccggcccccgcgcggcgggagaggcacagggggccgcagccagacaggagagagagggcagggagcacccaggcccccggaccccccgccccagaagccagcccccccaggcaggacaaaggagggggaggcccagaaccaaggaccgaaaggaaagaggaaaagaaacagccaccacaaagcccacaccgccgacccggcggaggccgagaaagcggccgccaccccccccccccccaccccacccccgacccccacaagcgggaggggcaggaaggggaggggcgcgccacaggaaaagagccacgcgacccagccccccaccaaggccccgggcaaccaaggcgaccccacccgggcgccaagaaagaagcccgaggaaggcccaccgacgccacaggcggagaagggcaaacgccagcagcagaagcacgggcaccccagcaccaaaagcgggcagggggaagccggaacccagcacgggggggggagacggcaagaccaaggccagcccaaaagaaggcggcggggggacacgcaacccgaggaggcagagaggagagcaaggccagccaggcacacagagaaagcaacaaaaacacaaccaccacacacgccgccccccccagaaagcagcaaaaaggaaaaaaaggaaaaaagcgggcaagggggcaagccagcccagcaaggagaggcagaggcaggggaccggagcaaagcagccggacagacgagccaggacagccaaggcgacaagaaagacccaccaaaaaacaaaaaaaaaaaaaaaaaaaaaaaaaaaaaaaaaaggaaacagaaacgaaaaaagggcaaagggccggaacagcacagcgccggaccaagagaccaggcgccaacacacagagacagccgcccgacccagaggcaggaaaaggcagaccaccagcccagccaaaaagagaggggggggggcaccacgcagacagggaacccacaaaggacaggaaagccggcccggagcggacacaggccgggacgggaaccacacccaagccaggaaagggaaacagaccgaacccgagccacccccgccccagggaaggggcacacaaggaggccagagacacaggggcacgaacaccggagacaggaccccgacacaagagcgggcaggcaggcggagccagaagccgggaccaccccgaacgggccacacagacgagccggagagaaccaggcccgccagaggaacacaaaaaccgcaagcagcccaggccagcaaaaggggggggggggggggggagggggggggcggaggggggcggaaggaggggggggaggaaaggggagggaagggcagggagggacagaggaggggaaggcgggggggaggaagggcagagggggaggcaaagagcggaagaggagaggagaaggagggcagggaggccgaggagagagcaagaggggggacggggaggggacggggaggggggggggaggggcagggggagggggagccgggagggggggggggggagccggggaggggggagggcagggggggggggagccggggagggggagggcaggggggaggaggaaaggagagggcaaggacgggcgggagggggaggagacggggagaggggcagggggagcagcgagccgggggggggggcggggggggggagagccggggagccggaagggaaacagcgagccgggcggagccgggggggagggggggaccgggggggggagaggggggggggggggggggggcggggaaggagagaagagggcagaggacagggaggggaggaggaggaggagcagaggggagccaggagcgggggagggcagaggagaaggcggggcagggcagaggagggaacccgggggcagggagcagagccagcacaaaacagacagaggagaaccagagccagccccagccaccagagccagaaccgagcaggccacaagcgggcagcaagaccaccagcaagcagcgcccaccagccccagcaaaacgaaaaaaacgaaaaggcgaggggggccacaccgaccacaccaagagcaggggcaggcaaacacacgccggcagcgcacacagcagcccaggccagccagggccaggaagacccaacaaaaaaacaaaaaacaaaaaagaaaaccaaaaacagccgggaaaccagaagcccgacaaaaccccgggcccgggccccagcaacgcgaggaccgacccacacacaccccgccccaaaagagacacagagaccaggaagaggagaacccccaccggcagccccacgcgccgccacccgggccgagaaaacgcaaagcagaagcccggcccccaggaggggccccagccggcccccggccagcagggcgggggagggagggcgcccagcgaaaacaagacgaaaggccccgaacccggcggccggaccgcggcccccccccccccagcaggaaggacagaggggcgcgagaccgggggcgcgggaaggggggagagccgcgaggccggacccaacagggccaggagccccaggcaacggccccaggggccgggaggggccccagacgggccagggcggggacggccccagcagcaaggcaggaagcaggagaagcagggcaccgggggaagaggccgccacaacgcagcggaagggccagagcacgaccacgaggccccaccccccgaaacacggacccgaagcccaagccaaggcggagggggagccaccccgccccgaaggccggcgcacacccagcagggggcggggggcgcccacaaccaggccgcggccgccacccaaagagagggcaggcccaagggcggggggcgaggggcaaggaacccggaaacgggaagacaagaggcagggggacccaacgagcaaaccgaggcggaggggagccgggaaggggaggggagggggaaagaggagagggacgagggggggggggaggaggagagaggagggggggaacagggagggaaggggggggaaggcaaggagaggagaggacagagaggaaggaagaaaagaggagagaaagagggaagagaaaggaggggggaaagggaagggggggagaagagggagaggaggaggaggagggaagagggagaaaagaggggagaggggaggaaaaagaagaggggagggaaagacgagaagcgaggaaggaaaaggagaggggggaggggagacaacagaccgccgacgggcaggcccggaacggcgccgaccccacagaaacgcacaaagcgagcccagccgggaaagaccccaaacccaccccacccccaccccgggcaagccccggagaccccccaacgcaaagagagaaagcaggcaggacggacagggagacagagccgggaggcggggggagggggggggcagggacggacaggggacaaagagacaaagcagaggcaaaccgcagcaacaggacagcgagggcccgaacggaaaaaaaaaaaaaaaaaaaaaaaaaaaaaaaaaaaaagacaagcacaagagagaggaggagagagaggcacagacccccagcgcccggacacccacggagaccaggcaacacacgccacagagcggcgccccgaggaaggaaaggcggggcaccacacccaaccccagggacggccagaggccagccaccgagcccagccaccacaaaagggcccccaccacagccggagagggggcacgccaagcccccgccgggggaagcaccggaggagcggcgcgcgggggagaacggccccagagaccccgggacgcggccccgcggggggacaccccgacccagcaacccccgcacccccacaccgacccacaacgcaagcagccgcgaggcccaaccacccaggagaagcgagagcagagccagcccagggcagcacaagggcgggcacagaggaaacccgagcccgaagaagaacagccaggcgcaaaggacaagaaaggacgaccccacaggcccccgagccaaagggcagaaagccaaagaggccgcagaacaccgggccggccccacccagcccgaagcccccgggacagggagccgcgaggcgcgagcccggcgcccaggaaaaggcagcccgcggaacacaaggacgcaccgcgggccgccgcccggcccacccccggcccccaaccgcaccggccagccagaccaaacaggccgcgccgccggagagcacaggacgccacacccggcccgaccggaacaggcacggcggccagccagcccgcagaccgaagaagaaaccccaaagagcccgccagaacccgccggcacacccaggccccaagcccaaggccaggaaggagagagaccagaggccaaggagaagaacgaacaaccagcaccagcccaggggaggcccaaccggagcgagacccacggaagcaaaggacgccaagaggcacaacagaaccgcaaccagaaacaagacaagcagagaaaaaagagaaaagcaacaaaaaaacagggggggggacacagaacacgaggagcgaaaaaggcacaccaggaagagagaaccacgccgggcaaggcacaagcaggcacacagaggggcaaaaagaagcgagcgggcccagggcaagaggcaagaacaaggcccgaacagagccgacacgcagaaaagccagggagaggaacgacgggggagccgggagggaaaagagcgggaaagagcaggcaagaccgagcaacccaggacccacaggagacagagagaacgaccccgacgccagggagggggcaagcacacacacacacacacacacacacacacacacacacgaaaaagcaaaagaaacgaaaacagaaccgggaagcaaggaaggaaaaagaggaagaaaaagcgcccagaacacaggcccccagagagccacgaggaccggaagccagaaaccagcacagaacagcccacccggcagggccgcccacgcggagcagagagaagccgagcaggcacgggagcggacccccccccccggggggagggccggagaggccacacacgccggaaaggacaccggaagccacccccgccagaagagccccggacaggaagcaaggcacccgaccggggaccacgcagccccaagcggcagggggcgcggcccccagaggagaccaggccaacaagggaagaccgggacagaagccggggacagccagacccaaagcccggggacagggaagaaaggcccggcccgggagcgggcaagggacaaacccgcacccagaaccagaagacagaggcaggggacaaggcaggcacgcaacgcacagagaaaaggcagccgggcagcagcaacagcccagccaggaaggacaggcagaccaaaacccaagcgggggccagacagggaagcgacacccaaacacagggacacagggaccgcaaaagaagccgcccggggccaggcgccaaggggaacccacgcaggaggcgagacaggaggacagaaccaaggccagccgggaaaaacaagacggcaaaagaaaggcgccaggcagccgcggggacggagccgaaagaaaggcggggggacccgcccccccaggcccacccgccgcgcccgggcggcagggaacacgcaacgaacagcaagcaagggccacccccggccagcgggccagagcagcgaaggcgagaaacaaaacagacaagaagggcaagaaaggggcaaccacagcccagagagcgggcgggggggaggggggggcgggggggggggggcggggaccgagacacagacagacacagaaagacagaaagacaaagagaacagagagacacagagagagacagagacacacacagagagacagagacacagagagagaacgacagagagacagagaaagagaacagagagaaagacaagacacaggacacgaagagagacagacgacagagacagaggagacagagagacagagacacagagagagagacagagagagacacaagagagaaaaacagagagaaaggcagagagacagagaaagacagagacagaaacagagaggaacagagagacagacagagagagacagacagaggaaagaacgggggcccgaaccccggaggcccccccccaaggaaaccccgggcccaccacccaagacggaggaccagggacgaaggcgacccgagcaggggaccagcgggagagggcagagagagccaggcggacagcaggagccaccgcggagaagaagaaaaaagaaacagccaggggggacggacagaggccagaaacacacggacaccggccccagggaacacacgaccaagcccaagagggggaacacggcaggcaggcgggaaaggcacagaggagcccccccccccccaaccccccagacgggcaccccagagaaagacccgcccggggccacaggaaacccaccaagccccccagccagaaggggcgggggggagaagggggagaggggggcaggaggaggagcaagagcgaacagggggggggcgccaccacagcccagggacaggggggcagggaggagcaagcaccagacagggaccacagagccacagcagagagagcgcaagggagggacagaggaaggcccgccaaggcacacagccagcagcaggggggggacagagcaccaggcgggcaggcgggcaccggggaggagggggggcaggccagggaacaggcaggcccaaggacgaggggggagcccacacaaggcgccccgccacaagcggccgaggggcgaggcggggcgcccccaacccccccaaaacccccccgaaaagcagagcaaacagggaacaagcagaagacagggcggagcaacaaaagagcaccccaccccccccgacccccccccaccccccaccccccacacaccaaccacacacaaaacccagggcaagaaccgggaggcccggggaacacacagggcggccaccggcggggccaagcaccgaggggcaccaacgccacaacagccccaaaggaaggaagagcaacccagacagacggccgggagagagaggggcgaggaggggagaagaggaagccaagaaaaacgcggcgcagccaagggccaacggagaacggcgagaggggcggagagaggccagggaagagcacgacgccccgaaggccgagcaaacccagcaaccacaggggccacaaccacgaagaagagacgggcacgaagacagcacaggacacaaaaaaaaaaaacaaaaaaaaaagagagagaacggcgaggaacggaagcacaacaggggacagaccccaggcgcgagcacagggcgcaaaggaagggggggggagagaagggggcagggagcgggcccacggggcaagagggagaggagagcgaaggcaggcaccacccgacagacaggcacagaaacgggaggagggaaggagagagaagaagggccaggaagagcgccagcgcggagagagggcggccaagggaagaggacgagcacgcagagaccgagggcccaggcccacacaggggcgaccacaccggaccccagcccggggagagcccccggaccaaacgcgggggggccccaggcgcccccccccccccccacacacacacacaaacacacacaaacacacacaaaaaaaaaaaaagaaaaaaaaagaaagagccaccagaccccagcgggaccaccccagagcgccaggagacgccaggccggcacacagcccggagaggagccagcacgaggcgcagacgggcgagagaaaaaagaggcccagaacacagggggggcggacaaaggcagagccggggcccgcgccgcccgccccggccaccaccccacaggcgcccccccagcaccgccaggggccccaagcccaaaaaagcgggcgcgcgggcccgggaacccggagcccggccccgaagcggacggacaagcggggggggggaggaaaggggaggagcgaagaccccccaaagcgggccggcacggaccacaccaggccccaagcggacggcgcccaacgcccgcagcaccaagacaagaagaggaaggaggggggggaccaacaccgccccagcccccaacgccggcccaacaaaaccgggggaggggagcacccagccagggaacggagaggcgggggcccgaggcggcgaggccagggcgcggggcccacccacagggggcccgagagccccgcggccacgggaggcgcgccacagcgcaagccgcgagcacaaacagggcgaggaggcggggagcgccgggcccgcgccagcgcgcggggcggaacacaagcccgggcgagagcaggcgggcgggcgggcgggcgggcgagcggagggagaacagccgaccagcagcgggaaggggggccgcccgcccccagacaaccgcccgcagccgcggcagcagccggcccgcacgggagggagggcgcggcgcgcaagaccgccacaggc

SEQ ID NO: 749 - RNA, 408 nt, Mus musculus
ggggggacggcacagagaggcagacgcaagcccaagcgaagggggcacgggggagcagccgggccggagcgcacccaaggcgggggaagacccaccgaccagcggcccgaagccccaagggccggggcacggcccgcggccccgaagggcgagaggcaggcaaggccccaggaaccccacacagccaaccaaacccagccgccaagggccggaaggagcgcgccagaggccgaagggccagccgaggcacaaaaacaacccggacacgaaaaaaaaagcaggaggaaaaaaaaaaaaaaaaaaaagaaggacgcaaaaccaccggccaggagacgagaggcccggcgaggacgccggaacggcggagacaggagcacaacagccacgcgcgggaggaaaaaggaaaag

SEQ ID NO: 750 - RNA, 3087 nt, Mus musculus
ggggccagccgagcaggccgcccggcagggaggagacaagcaggagggccagcaggagaaggcagagcgggaaacgaagcccaaagaggcccaggaaaggcacggggcagcgaaaaggacgcccggggccagcaccgcacaccagcgccaccgccacgggaggaggggaaagaagagaccagacccacagggggcgcaaccccccgcgcccgggcagacacaagcaggaggccccacagacgcaaaaacggcgagagcacacaaacaacgaaaacgaaccgagaagggcaggccaacagcaggcagcaaaaaggccaaaccggagcagcagccccagcccaccaggacggcaagaaggacagagcacacgaagcccagaggaagaggcgacagagaccagggagagaggggaagaaaggaaccagaccggccacggcggagcagggggagaggacgggaaaaaggcaggggacaaacgcaagcgcagacgccccagggcgggcaagcggaccaaggacggagacgaagagcagaagcaggagagaccagcacaagcgacccagccccaccccagccgccagacagacgcgccgcagaaaccgaggcaccccgaggccccgagaaagggggcgggggagcccacgagcccgaacccggacgcagcaagaccgagcggcaagaacccgcccaccagagggcaagggacagcgcccgcacagcgcagagccgggaacacagcgccaagggggcacccaccgcggggcccgccccccaacccgccaccccagaggccggcgccgccacgaccaaggacgcgccgccgccgcccgagccgggccggacaccgcgcccccgccaaaagcgcaagcccacggggggcggggcggccacccggaagcggccccgaccgcccgccccccgggaagcagcacgcccccggggcagcccggacacggcagccgcgcggccagaccacgcgagcggggcggaacggccaaccagaggcccgagagcccgcccgcccccgccccccagccgggccacgagggggaaggcccgagggggccacggggcacggagcccgggagggcccggcgcaaccgaaccacccagagcacgacggcaccagcccggagcaaaaagacgcggccacggaaaagaacaaggagcaacggcaaaaacacccggaagccaacaccgcgggaaaacgcagcagcagacgacgcagaaacagaagaaccagccccaccaggggagagaagaaagacaggaaaaaaaaaaaagccgagaaaacaaccaccaagagcaggagacaggacacaaggaacaaaaaggagaaaaagggagaaagggggcagcaacagcacagggacaaaaaaccaaccaaccaaacaaacaaacaaacaaacaaaccaaacccaaaacaaacaaaacagaaaacaaacaaaccaaaaaacaaaaaaaaagaaaaacgaccaaaggcggggaagacggagcgggggcagagaggaggggcgacaaagacgagagggcaagggccccgggagggagccggggaagccacagggaggagggaaaaaaggaggaaaaggggcagggaaaaacgaaagcaggaccaccagaccaaaaaagaagacggaaccacggcaaaacacagaaaaagaacaaaggaacaagagaagcggggaagggagagagggagcgcagaaaaccccacccacaaagagcacagagaccaccacagcaaaaaccagaggaacaccagcagggggacccccccagcggcaggcaggaggagagacccagaacaaagaaggaacacacaaccgaagggggaaaggcaccagggagggcaaagggagccaaaacagacaggggagaggggaccagcgccggggaggaggcggggcaggaggagaaggaccgaaaacagcaagagcagccagcacggccgacggccgcagacagggaaagccgaagggggaaggacagggagcgaacaggaaacaacagggaaaaaacaggaagacccaaagacccagaggaccacaaaccaaacccacccagaaaaggccagaagaaagcagaagggagagcagaacaaaccaaagacaggaagaaggcggggaacagcagcaagcaagcgcagcacgagccccccacgacagccaggcggagaagaggaggggagccccacacaagccgaaaacaggaacaggagaccagaaagcaaaggaacaggaagacacggacagacaacaagaaagagcaaaggacgcacaggaacaaagggccgaagggaggcagcaccggccgggaaaagaaacaagccgggaaggaaaaggccaaaaccaaaggaccacgcagcgggaagaaaaaacagacgagaacgggacggagaacaagagcgggaaagccggggggggcgcacgccaaccagcaccgggaggcagaggcaggggacggcgaggccagccggcacaaaggagccagggcacacagagaaacccgcccgaaaaaaccaaaaaaaaaaaaaaaaaaaaaaaaaaagagcagagaggcaaagcaaggcgagagaaacgaaagacagaacaaaaggagagcagccgggcagagagcacacaccaacccagcaggaaggcagaggcagggaacgaacgaggccagccgacacagaggagccaggacagccagggcacagagagaaacccgccaaaaaaccaaaacaaacaaacaaacagaaggggagcaggagaagcaaagaaccaggagaaccaggaagggcgggaagaacaggcccaacggaaccacaccgcggaagcaagacacaagacgggccagggagggagggggagagagaggggggcgggagccgcaaaagcacagagagcacaaaacaagaagcagagaaagcaaaaacccaacagcccagcacccaccaaacccccgaacagaaacaggccaacaaacacaccgcagcccaaggcacaacaagacaggaaaaaggcggagcaccaaggggaaaaagaaaggccaacagacacgcgaagccacagcaggggcacaccgagcaccacccaccgaagg

SEQ ID NO: 751 - RNA, 34447 nt, Mus musculus
acgaggagagaaaggacgccaccacaagaggagccaccccggagaaccacgacaccagggagcgacaaaccgaccgagaaacacgaccaccgaccaccccacccaacccccgcggcaaaacaaaaaaagaaaaaaaaaacaacccaaaggagaggcgagaccaaaccagaacacacagaaagcacgaaaacaacggacgaaaaaccagcacagaaaacaacacgagcaggaaaacaacgacccagcgggcgaggaaacaagggagccgcgacccgccacgggaggcccagcgagagccacccgcagacccgccagaaaccaagaggaacacaaaaaggaaacgaccggaaacaaaacgaacaaaccacgagacaagcacccccaaagccaaacaaagagcaaaaggcaaagacaaaacaagaacaacaaaaagaggaaacggaaaagggaggaacagacaggcccagaaaaaagaacaaagcaaagaaaagggaggaaacacacaacagaaaccaaaaggaaccaggaacgaagcaagcagacaagcaacgacaacgccagccccaccaaaagccccccgccgggcccagcacgcgacgagccgacaccacaccccgagccagcccgaggggcaccccccacaccgagcggaagggcaaaccagcgaaacaacgccagcaacggagaacgagagaacgcaagcaagacccagaacaaggaaacacagaagaaaaaacaggaagagggaggcggaaagcaaacaaaaaccaacaaacgacaaagcagaacaaacacaagagaaccaggagagcccgaaaccggaagccaccaggaacacagaacaaaccacacgacacgcagaaaaggcaccgacagaacgagcaagcaagcgacacaggcacgaacacgaagaacgagaaaggcagaccccaaggccggacgcccgggggaaaacacagccaggggaaggggggaagaaccaccgaagacaaaaaagagggggaaaggaaccgaaggcagcagaaaacaggaaaagcggcagaaagaggaaagaaaaaaaaaaaagaaaaagcaagacgcgagggggccgcgacgccagcaagacagagaggggcaaaggacaaagcccgccaagacaccaagaagccaaacagcacaccagccaggagaagcaggcaaaggagcaaaaaaagaaagggcaggaggaggcaaagggcaagcagcacccagggaagcagccgagaaacccagagacaagacggccggcacacacacagagggagcagggcagaggggggggggggggggggggggggggagggggaggcggggggggggggaggaggcagggggggggggagcgggggggggggggggggaggcaggggggggggggggggggggggggggggaggcaggggggggaggcggggcggggaagagagaaaacccgccaacagcaggcacgacgccccagcccccggaaggcacgagggcccgcaaagagacacagaacggcaacacccccaccagcccaggccaccgaaacaacagcgggcaccaaaaggcacacgcaagccgacaacacagggcaacccaggacccacacagagggaaggagagaacgaccaacagaggccgagcccacagagcagcgcacacacacacacaacaccacacacacacaaaaaaagcacaaaaaagacaaagaacggagagccccaaaaaaaagcggccaaacgaaaaacacccaggagcacaaagccgcaaccaagaaaacaaccacacacacaaccccgcaaagacccaaaacaaagaacaaagaaagcaaaaaaaaagaagcaccaaaaaaaaacagaaagaaaagaaaagaaaagcgccacgaccaacaaaaacgaaagaaagacaacagggcgaaaagaggcaagagcacgacgcgaagaaggccgagcaacccagcaaccacaggggccacaaccacgaagggaccaagccccagcacacgaagacagacaggacacaaaaaaaaaaaaaaaaaaaaggccccgccccgcgcggaacgaccggcaagacccaacccaaaacagccaggagagagcggccccaggaacacgacacaccggagcacagcaagaccaccaccgcaacccggcaaagagagacccccagagccacgaggaaccaaggaagagcggggacaggacccaggcacgcaccccagagcaaaccaggccacagcccgcaacccaaacccccacagagaaggggcacccaagaggacgaacacaggcacaggagggacaagccacagcagagacagcaagaccagcaacaccagagaaacggaggcaagaggcaaaagaacaacaaaaaaacagaaaccaaggcacgcacacacagaaccacccacaccacagggagccccggaaccccaacacacagaaaaccaagaccgagcaaaagcaaccagagaaaagagaacaagaaggacaaaaaacgccaaagaaaacaggagaacacaggaaacaggagaagaccaaagaggaaacacaaacaccaaagaaacaagaaaacacaaccaaacagggaaggagcgaacaaaaccaccagacaaaaaggaacagaaacaaaaagaaacacaaaggagacaacccggagaagaaaaccaggaaagagaaaggagcacagagcaagcacaccaacagaaaacaagaaaagaagagagaaccagaggcagaagaaccaagaaaacagacacaacagcaaagaaaagaaaaaaaaaaaaaaaaagcccaacccaaaacaccaggaaacaggacacaagagaagaccaaaccaaggagaaaggaagaagagaggaagaccaacaaaaggccagaaaaccaacaaaaagggcgcagagagaaccacagggccaggccacagagaccaaaaaagggagggggcgggagaggccagcgggaagagcacgacgccccaaaggccgagcaaaaagcaaacccagcaaccacaggggccacaaccaccgaagagacgaccccccgggggcgaagacagcacaggacacaaaaaaaaaaaaaaaaaacaaaaaaagggcaggacccgagccggaaaagaagggagcgccacgggccagaaacaaacccggccggaagcagcaaggcccagcaaagccaccccaaccacaaaggccccaaacacccaccccacaacccccccagagccaccccccgcacaaaaaaaaaggaagaaacgccgcagcagagccggcccggcacaaccccccccccacaagccccgagcgaaggcagagaaggaaagcaaagcgaggacaggaccccaagacacaccgcacgacagcaggcaaaggagaaaagaaaggcagaacgcgaaccacagcagaacgcgagaaacccacgccccagccgaaggggcgggcagacaaagacgaccaaagcaacagagggaggacgggcgggacgaagggggcaccaaaggggaaaccaggggcacacgcccaacaggacggaagggggccaccaaagggcaaggcaggacacagcgcccacggagaaaccaaacgggcagacccacagagaaccgaccaagggaagaaggaacagcaggccagaaccagcaccggccaggacccccaacaagaccggcagcaccggccaggaccccacaaacgcaccccaggcaagcgcccaacaccacccaaaaccacgacaggaggaaaacaggggccccagaaccaaccaacaagaaaagccaaagggcccccaacacaggacaggcagaacccccgcccaaaagcgccaaaacaggccaaggcccaccccgcagcagagggcagggagcccaagcgagcgaaaaagagacacaaggagcacggaacggcccggggccggagcacaaagccaaaacaacacaggcacggccaggacccaaagccccaggaccgaccgaaagaccaaaccaggaagccgcgaggggagcgccaggaaaggccccgcgcgccgcgcggcagcaaacccgaggggcacacgaacgcgaaaaaaaaaaaaaaaaaaaaaaggccaaacgacggccgacacagaaggagagcaccagaagcacgagccaggcgggggggaggggccaggaagccaagggcacccacaacccccaacggacgccgccggagagcgccacccgggcccgccgccaaagagaggaaaagacaaaccggcggcagcagggggacccacaacaaacaagggacagacgcccagcccacaggaaacaggaaacagaaccaacaccacaggaaaaccccccaaacaacaggcagccccaccacaacccgggagaaaagacagccgccccgggcagccccagcagggggggaggggagaccgcgcaggaacacaaaggccccaaacccacccagagggaccaacgcgcaaaggaaggagagaacaagcaccgacagccgggcagaccaaagcagcggagacagcgcacccaaagaaaaaagcagagaaggagccacagccaaaacagcaggagacaccaaaggaaagcgcagagccagcaacaaaggcagcagcagaaaagaaaaagccagggccggagagaggccagcgaaagagcacgacgccccgaaagccagagcaaacccagcaacacaggggccacgaccacccaagagacgacgcccccggggcgaagacagacagcaaggacacaaaaaaaaaaaaaaaaaagaaagaaaaagaaaaagccagaggggagaggaagaaaaagaagcgagagagaagaaggcagagaaaagaaaaaaaaaaaaaaggcaggagaaggagagaggaaggcaacaggggcaccgggaacaccggacagccacagccaaccagagaacggaagagaagcgaaacaaaggccagaagccaaggccccaggcccgacacagggccagggccaccggcaggagacacaaaacaagcgcagaaaaggaggcaaggaggccaaagacaaaagcccccacgaaaaagaaaaggagcagggcaaccaaaaaagaagggaaacccaagcccaaaaaggagccaacagccacaaaaccgaagagaagcccaccagaaaaaaccccggcgacggcagaaaccacacacgaagccagaggaggcccaggacggggaaacccgggaaaaggacacaagacccacaagaaggccaccgccaacacagggaccccagagcaggggacacaaaagaggcagaggggccaaaggccagaaagaaagcacaccagcggggcccagaaggacaaaccccaccaagacaagcgggaacaaaaaaaaaaggcaacaacgcacacagcaacagacacagacacacacacgcacacacggcacacccacaagcagaaaacacaggcaagaagaagacaaagggacaagacagacaccaaaggcaggaacgccaccaaagcgaaagaggacggaccaaaaaagccacagccagcgaagacaaaaacaacaacgggagaaaggcagaacggacacgggagcaaagaaagcagcaaagcgcaagcgggaagaccaaacgccgagcacccacagagccaaccaccccacccgcccaaagcacggccagagagggacgggcaccgccgcccgcccagcgacaaaaaaaagagacaaaacacagagacaccagcaaaaagcaccagaaagaccaaaagcaagaaaggaaaaagccaacaggaaaacaaaaagacgaaaacacaaacagagacaccacaagaagaaacacggaaagcaaaacacaggaaacggaagcgaaaggggacaagcaggagagaacagaaaaaaacacaacacaaagacccgaaagccccaaccccccccacccgcccccaacccacccaccccacccggcccggcaccccgaggggaagccccaagaccaaggaccccccccacgaggccacaggccacccgcacagcaacagagacacagcgggggacggagcaaaggacccccaaggggccaaccagcccgggacccagccccaggggcccgggagaacagaaaaccaaaaaccagaaggcccggccgggcgggggcgcacgccaaacccagcaccaagaggcagaggcaggggacgagccaaggccaaccggcacaaaggaaccaggacagccagggcacacagagaaacccgcgaaaaaaaacaaaagcaaaagccagaaggcccaagagacaacagaacgaccgacagcaaacgcccgcagggcggggcacacccacacacagacaagaggggaaaaccaagcagaccgcaggcacaaaaaagacgcaggcagggggggcgagacaggcgcagcccaagcggcaagaagaccagaagccaaggggaccgcgcccaccgaaggagcgaggaaggggccacagggagagagacccccagccagcggcagaagcgaaagcgggaaggaaggagggggccgggagaggcaccaaaggagaccgaggcaaaagccacccaagccaggggcccgccgcgccgcgccgcgccgcgccgcgccgcgccgcgccgcgccgcgccgcgccgcgccgcgccgcgccgcgcgccggcgggaacaacgcccccccacggaccgaaacggaaaaggcccacgcaagcaaaaacagcacccacacaaagcccccccccccccccccccccccccccccccccccccccgcagcccgcgccggaaccaccaagaccaggcggccgaacaacagaaaccacacagccgcccgaggcaagaaaaggaacacagcaccaccgaccaaaacgacaaccaacaacccaaaaaaggacagcacaaaacccggaagaaaaccaaaagaccaacagccagccaggaacacggccaaccagaccaggcaacaaaggcaggcagaccgaagcgaccacagaacaagccaggacagccagacacagagaaacccgccaaaaaaacaaaaacaaaaacaaaaacaaaaaaacaaaaaaacaaacaaacaaacaaacaaacaaaaacacaaacgacaaaaaagaaaaaaaaagccacccgggccgaacaaaggcccaaagagcacgagccgcagaagaccggggaacccaagcaacacacagggacaccaccccgaaaccagacaagcaccgaccgcgggaagcacacagggacaacacaaaaacacacacacacggagacacacaacacagaaaaaaggacaaaaaacgcaagggagaaaagagcacagcaaaacccaggaaacaacaggaggccaaaacagaacacaaagaaggcaacaagaaaacacagagaaggcaaaaggaacacaggaaaaggaagaaaccccaaagagggaaggacacaaaccagaaaagagaagcccaagaaaaaaaacacaagaaaccccacaaaaaagcaagagcaaaaaggaaggaagaaacaaaaaaagacaaaagaaaaaaaaggaaaagaaagcacccccagaaaggcagaaaaccagaaaaacacacacccgcaccagggaccacaaaccaaggaaagggggagggacaaccccaaagacaagaaggaaaaaaagggcacaagaacagcacaagcaaggaagcagagaccaagccagcaccagaaaaccacaggaaccaagagagaacaaagaagcgaacagagaacacaggaaagacaagccaagagagggagcagaacccggacagaggaagaaacgccaaccaacgagcaggcacaccccgcccgccacagcccggaccacaaccagccacagccgagaaacgacagagagagggccaagcacagccaccacaagagagccagaaggagaacacgcacagccccacacccgggaacaaggcacaaaacagccaacacccacccacaaaaagcaaaacgcccgcacccaggggcaaggcccccaggagagagcagccgaaaaagaaaccgcagaggcaagcgccaagaacacagaaacaaaaaacacagcccggcaggggcgcaacgagagcaggccaagcacggccgaaggcaagacagcgcaccacgaaagccaggaggacacccagcgcagggcaaggaccagagcccacacaaaccagaacgaacgcaccaggaaaaacgccaccaaaacaagaggggaagaacccccaccccacccggcagccccacccacggagaagaagggcaggaccccccggggaccaggacccaacgccagcgggaaccacccaaccagcccacaaaagcaaaaggcgcccaccagcgcggccaacccagaaccagggcccccaaggaaaaaagaaagaggggacaaagagggggggggggggcagcaggaaggaaaacacaacagaaaggcgaaaaaagcacaaaagaagaaaacaacccaaagcaagacccaagaacacaacccaggaagccagccaccaaaggggagggaaagaaggccagccgaccgcaaaacagagcaacaccaacgccagacggaacgggagccagaaaaaaaacgccgagcccaccagccccgccccaaagacacaggcccggaaagaccccaaaccaacgagccggcggacgagagacccaggacccgcaggaggcggcacaacgggaagccccagcgcagaccagaggcagagcagagcaccagagacaaccacccgccgaaaacacaaacagacagagaaaggggagccccacaggcacaaccaaggaggaagccgggagaagagaccaccccgcagacccacccagaagaaaacacccacgaaggaaccagaccagaacacaaagaggagagacagaaaggcaaaacaaagcaacaacaccggacacaagaaaaccccaacaggaaaagaagaggcggggacaaaaaaaagcaagaaccaaaaccagaacaggaagaagcaagaaccagacagaaccagagggcaacagagcaggaaaagcaagaagagagacgaaaaagaaaaaaaaacccaagcccccagagagaaacagcaacaaagagacaagcaaagaaacgaaacacccgcaccagcagaccacagacaacagacccaaccgcaaaaaaaaggacaacgcggggaacggcacagaaaggccagacaagagacaggaaacccaacacagaaagcgcacaaacaaacagacaacaaaccgaagaggacgcaccacacaaaacacagaacaccgaaagcaaaaccccgccaaccccaaaagagcacgaggacgggaacccaggggcaggaggaaaggagagaaaccaaacccgaacaggaccaacccaaccgcggcacgagccaacgagacaccaacccagccaaaggcaacagaaaacaaaccaacaagaccacaagaaacaaagagaaagaggggcaacagggggaccaggaaaacgaacaagcacgaggcagcacaaacaaaagccagggcaaccagggggcagccacagccaacaaacaccacacaagcgacagaacaaaaaaggcgcaggcaagccaacccaagcagagccacgcagaaccaggacaccccccgggaccgcaacggcccgcaacaaaacaaagaaaacaaagaggccagggcacagaacagcgcccacgccaccacagaacaccagaacagcgcaccagcgccccagcgggagccggcgcacaggcgagagcaaggaaaacaagcacgaccccggaagccacaaccaacggccacccaaaaaagcacgacccgccagaggaagcacagacgcaaacaacagcaccaagcggagaaaacgaaaaggaggaaaacccagaaacccgggaagaagcaacaaaacacccaagaagggaaagacagcaagaggcaaaggaagcaagaaaaaaaaccaagagaaccgggggcaagggagcagaaagagggggggaagacagaaggcaaccggcccacgaaccggaagaaagcccacccagggaccgcccaaaaagaagagacagcacaacaggacccagaaaagagaagaagcggaggagcacagcacagacgggaagccaggcaaaagcggacaaggacggcagccagagaggcagcaaggggcacaacacccgcacgcgaaagcagcagccaaagagagcacaaagcccaaagccccaaaacaaaaggcaaacgcacagcaaccagaccgccaggaaggacagacggaaccaagggaaaagggaaaaccgaggagagggggccagccagcacaaccgaaccaagagccgccgaaacaaaacaggaagaaaaaaccagcaagaggcagaacaagcaacaggacaggaagagaaaaagaaaaggaaaacagagagaaggaggagcagggggacagaagagaggagcacaggaagagaagagagagacacggaaggagggagaggggagagaggggaggccggaacagggcgaggaggaaagcagccagacgcccgaccccagagcaacaggcgcacccagcaccggccccaagccaagaaaacaaacaagggacaaaaaaacagcaacaaaccacaaaacaaaacccagacaacagaaagacaacagaaaagcaaacaagcccacacaagcagcggaacgaaaagaccagcaaacgggccggagacaaagacgaacaaggcaggagacagcgagcgcccaccagaacccgaaagagagaagggagggaagcaaccaggaaagcagagccagagaaaacacgcaaacccccaggcgcaaacaaggaacccaaaccagcccaagagaaaaacaaggcgaaaaaaaaaccaagaaaaggccaacaacaaggcacccacaaagaaggacgaaccaacagagaagcaaaaaggcagaaaaaaagacagacaaaacaccccaaaaaaaaacagaaccaaacaaagaacaacaagcaaaaacgaaagagcagggaaaaaggcaacaagagacaaagaagacaaaaagcgaaaaccacaaggagagaaagaacaccaaaacaacaaacacggcacacagcagcagcaggcagcaacggcacacaggggcccacacagaacgcccagagacaacagaggacacggaagagaaccggagacaaaaagaaagcaacaaacagcaaaagacccaggacacacaaaacaacacacaacacacaacagaaacaacaacacacgacgacaacaacaaggagaagaagaagaagaagaagaagaagaagaagaagaagaagaagagaaaaacgcaaaacaaagaaaaaaagaacagaagaaagcagaaaaaaaccggccacacgggaaagcaagcaaagaccaggaacagcaggacgaccaaaccaaagcagaggaaagggaccaagcgccccaaaccaaaagcccccacccaaccagcacacacagaacaacacagaacagaaggaagaccacaaaaacagccaaaaacagggggaagaagagccccccaaggcaaaaaaagcgaccccagagagaacgccgggaaggaagaaggggccggggaggaagggcccgggcaggaagaaaaaaaacccacaccccccagcagcacccggccgcccagcgcagccaggagaagccgaacacgccagcaccagccgcccccgacgcagcccccaaaaggaccaccggaaccagagccccaaaacaacaccccaaagccggcgggagcccaagaaaacgagacacaccaagaaagaagagaaagaacgaaacacacagaaaagcaaaccaggcaaaaaaacgcagcccaaacccaagcaggcgacagccgaaagacagaaccaaaagaaaaggaaagaaagaggaaggcaaaaaaccggaaagaaaaaaaaaaagcagaaaacagcagggcaaacgaaaacaccaacacacagagcaacaaaacaaaaacgaacaaccaaaagacgcaaacaagcaaaaaacagaaaaaaacccaaaaagcaagagcgggcagggagcaggaacccagaaccaggaggcaggggcccgagccagaaaaccggcacaaaaaaagccaggacagccagggcacacagaggaacgcaaaaaaaaaaaaaaaaaaaaacaagaaccccaaaagagcaggcgaagcaccgagagccacacacagcagcgccgcacacgccacacgacagaacccaaccccaaaaaaaaaaaaaaaaacccaagggggccagaccagcaccagaacggccaagacgagcggggaaggagcacacagaaaacagccaagaaaaaccacaagacacgaaacccagaagacccaaaagacaagcaaaaacaaaaaccacaacagagcacaagcacaacacggaccccagagcagcgccccaggcggccggccgcgcgaaacacgaaggagagccggaccaccagcagccaaacccaagacacaccacaacaaacagcagcacaaaaagaacacccagagcccaaaggcaaccagaaccacaggagaaaacaaaagaaacaaaaacggcaaagcagggggacacagacaccccaggagagcaacagcccgaggggacaagggaaacagacgacagacaagggagaccgccagcaccgaccacaaaaccaaaagagcgaagaaaagaggggacgcccagggcccaggagagacaggcaccaagagacaggaccaacaggacaggcagggaagaccacagccaacgcagcaccgagacagggccggagcccggcgccggaaccacgagaccaggcggcccgaaccagagaccaccgcccgcccccgaggcgggaaaaggcggcgccaccacgcccggcaacgcagcacgcgacccacgcaacgccaccaggaggaggagagggaagacagaaacccagacacgaggccaaaaggaagaagcaacaaaaagaaaaggaacagcaagacggacccaaacgcaaaaggaagggacgaccggaaccagagagggcggcccgagagaggcacaagacccccaaaacaaaaaggaggacccagccggagcaaaaggccaaggcaacccggaacaaagaaacagaaaagaaaagcagaaggacaaaaggaaaacacaacagcccggaaaacccgcacagagagagggggaagggaaagaccagaggaaaagaaagagagccagaaagagccaggcagaggaggaacaccccaaaccaagcaaagaacaaaagacacgaacaacgcccgacggaaagggagacacgagaggcaccagacaaccgccccaagcgcacccacaaacacccagcgaaggcaggagagggacacagacacacaaccacacaaaacagagcagacaggacaacaacccacacaaaaaaccacggaaacacaacagaaaaggaaagcagaaaagacaacacaaaaacacaacagcgagaaaaaaagaacacgcaaaacaaacgcagagccagaaaaaagaaccacaacccggaagccacaaggcaaaaaccggcaaaaaaggggggggggggggacgaggggggggacgaggggggggggggggacgaggcaggggcagggaagcagagaacaaacgagaaacgaccccccccgaggggccaagccaggacaccagggggggcgccagccgagccagcccaacgaaagagacacaggacagaggcaacaaaacgagaccaggacacggcaggccaagccccacacgggagcacgacagcaggcaggccaggcgccgcagaacgaaaacacacggcacaagcaggaagcaggagaccacgaaaagacagagcagacacccaaagccacacccaaagacacaccgacaaaaaggccagaccgccgccccccaaacagcacaccaacgaaggaccaaggacgggaaagagaccaggggccaccaccaaaccacaagcgcaaagccaagacaaaagagcaaaaaaagaaaaacccggacaggaggcaggaaacagaggggagagcagaccaacgcacaaagccgggcaaccccacgcgaaaaaaaaaaaaaaagaagaaggaaggaaggaaaggacagacagcacacacagagccaaaagagcccagaccccaagcacagcagaacaggggagcaggacgcacacacagaacagaaaagcagaagcgacaagaaaagcacaagggcacacagaaaagacagaaaggccaacacaaaaacagccagccgaaaaaaacaacggggcggcaagaaggccagcgggaagagcacgacgccccaaggccgagcaaacccagcaaccacaggggccacaaccacgaagagacgagcccccggaggcgaagcagcacaggacagaaaaaaaaacaaaaagaaaaaaaaagaaaaaaaaaaaaaacaagaaaggcaagaggacacagcacaccacggcaggaaaagccaaaggaaaccaacgaccaggagacagcacgagagaggaacgggggagaagggggcaagggacgcaacaggcaccaaggagcagacacccaggagggaccacaagccagaaggacaaacaagccgaaacaaggagaaagcaggggggggggggggggggggggggggggaaagaagaccgaaaacacgaaggaaaagcaacaaaaaaacaacaacaaaaggaaaagcagcaaagaaaaaagcaaaggaaaaaacacaaaagaaggagaaggacaggagaagaaggaaccggggcggaggcagagcccggaggagaacgaaaaacaaaagcagaggagacgggcaggaggagggaagcaggaacagccacacacacagaccagggagaccaggccaaccgaccaacagggaagggacaggaaaaagcaagaaaagagcaacacagagaaaaggcaagggggaccacaggacaccaaaaccaaggcaggaaaagagcagaaacgaacagccacgcggggcggcagccagcgcgagacaagcacacacaaaggcccccagcacacgaacacacccagccagccgggagcaacaaagcggcacaaggacgcagcgaccacagcacgaggcgccacacggcagagcccacccaggccccacaccggagccggccgaaaaaaacaccaccaagagcccaaaagacaccaaagacaggggaggaaaaacaaaagaacgggcggagagaggccagagaagagcccggcgccgcagaggagccaggagaacccagcaccacaaacagcacaaccacgcacccaggccaggggaccgagccccaaacccgcagggcccaacagcgggggaaaaacaacacaggcaaaacaccacacaagaagaagaagaagaagaagaagaagaagaagaagagggggggggggggggagaagacaggaccgaaaggaagcagaagggccagaagacgccacaccaaaaacaaacaaaacaaaagacccgacaacagaaaagaagcagaacaacaacgggagacagggcccagaggaaccaaacaaggcaggaacggcaagagcaaggcagaggccaggaaggggcccccgccgcccaaacgcaaccgccaaggacccgggaccacaacccacaggcaccaacgaggccacccagagaccgcggcaaagcgagaaagagccagcacaacaagagacggggacgagggaacagccccacacccccccccaccaacaacaggcccaaggcccacccgaagggcaaagcaaaccggcccacagcagcaggcaacagggccaccgggaaaccaaacccacacgcaacacgagcacaaccccaagaccccgcgcggcaagcagagccggaaaccaccagccccagcccccaggaccacaagggcaggccagaggagcagcacagcccagggggacaagggaagccgcaccacgccagaacagagggcaggaggaggccagcagccccccggggcacagaaggagcccagcagccccccaccccaccccacccccggggcgcagagggaggccagcagccccccggggcacaagcgccaaggacggggccgccccgccaccaaaccgcagaccacgacccggccagaggccgcagggcaaaaagaaagaaacacaaaacagggacaggaaaagaagcaaaaagccacaaaacaacgaaggaaacacccgcggacgaaggaacaaaaacaaacacaagagggcgaaaaaaacaaggaacaagaaccaaacagaccaacagaacagcaaaaccgagccaaaagaaaaagggaaacacgacaacacagaagaaaaaccagccgaaaaaaaacacaggccgggcaacggacagccacccaaacaacgggaggaaaggaaaaggcgggccggaggaggcaaccggcaaaggagcgcgcccaccaagcacaagaaaccgccaaaaaaaacaaaacaaacgaaacaaacaggggcggaaagacagcgagaggaagagcaggccgcagagggcaacaagagcaacaaggcacagggacgcagccagaacaaaaccagagaccggagccccccagcccccacaggacaaacacagagggacacaacaacaacaacaacaacaacaacaacaggcagaacaagaaaagagaaaaccaacaaaaacaaaaaaaaaacacaacagcaaacagagcacaaaaccaagaaaaagaacccaggaaaccccaaaaacaacacaggagagcccgaccaagaaagcaaaagaagaggaggagaaggaagagaaagaggaggaggagggggaggaggaagaggaagaggacaacaacaagaagacaagcgggcaggggagcaaccggcccagcacgagaaacagggcaggggagcggagcacaaccagccaggccagagggccaagacagccagagcacaggaaagacgccaaaaaaaaaaagcccccaaagaggcagggaacaagcagagacaaaggaaggaccgggcacagacaaagacgggggggcagcagggcaccgcacaaaacagaccaagaagcagggggaggaaagggacgacacacccaacgcgcacaccaaaggaagcaggacggaaccaagcaggcaggaagcaggagcgagcagaggccaggagggagcacggcgcagcccccaagaacccaagacaccagcccagagaggcccacccacaaggggcccccccgacacaagagaaaagccacagggaccaggaggcacccaacgaagcccccaggaacccagcggcaagaacacaaaacaaccagacagggcaacccagaaccagcccagaacggcacacagaagaagaaggaaaaagcaggaacaaacaacggccgagacagggccggagcccggcgccggaaccaccgagaccaggcggcccaaaccagaaaccgccgcccacaacacaaaaagaccgaagcacaagaaacaaagccaacgggagagaaacccaaccagaaagcaaaaaccaaaaaaaccaacagaagaaacaagcgggggaaacaagaagggcagcagcagcagcagagcgaggacacaagaacacccacagaaagaacccaaaaacccccgcgcgcaagacgaacagcaaaaccgccggacccaaaccccacgaacaaaagcaagagacgcacaacagagaaaagacagaaacgacaggaggacccagggccgcagcgaaggcacgcgcacaaagaacccagccaaagaaggaggcacagagcaacaagaagacaaaagaaaagcagggagcggaagagcaccagaccaagccaggaaaaaggaagcacagcgggggcgcacagcagacagcagccagaccacacagggagcaggcaaggcaggaggcagggcagagcagcggcaagggcacagacacaggcaccagaaaaagagaccaggcaagggacgaaacacaaagccagccccagggccacccaacccccaaacagccaccaacaagaaaccagccacaaaacagaaccagggagcaccacaaaccaccagcaccaacaacacccacccccacccaaacagaagccgaaggacaagaaacgaccaaaaccgacaacaccaagagccaacacggaaagaacaagagaagagccggaccaaaagaaaggcagagccggagaacaacacagggacagacgggggggggggggggggccaagacagggccggagcccggcgccagaaccaccgagaccaggcggcccaaaccagaaacgccgccgcccccaaggcaggaaaaggcagcgccaccacgcccagcggggacagacggagaaaaggaagacacgagcgccagacacaccagaagaggggccagccaaccaggacgagcacagggccccaaggagaagcagagaaaggacccaagaagcaaagagggcagccccaaggaggaacaacaaagaacaaccagaccccagagccccagggacaaaccaccaaccagagagacacagggggaccaggcccagcgcaagaacagcagagggggccgcggcacaaggaaggagaagcccggccggaggaaggccaagccccaggaggggaggccagcgccaggaagcaggaggagggggggagcagggggaggggaaaggaggcagaaggaaaccagaaaggggaaacagaaagaaaaaagaaaaaacaaaaaaaaaaaaaaaaaaaaaaaaaaaaaaaagaagacagagcgccagacacaccagaagaaggcacagaccaacggaagggagccaccaggggcgggagaacgaaccaggaccggaagagcagccaggccacccgcgagccaccccagcccaaagagaaagaaaaacagagacacgagcgccagacacaccagaggagggcacagacccacacagaagggagccaccaggggcggaaagaaccaggaccggaagagcagcaggccaaccagagccaccccagccccggggacagacacacacacaacaagaccgggcgagcaccaacaaaaggcggacaaacaaacaaaaaagacagaaaaacggaaaaaacggcaggccggggggggcgcagccaaccagcacgggaggcagaggcaggggacgagcgaggccagccggcacagaggagccaggacagccagggcacaagagagacccgccaaaaaaaaaaacaaaacaaaaacaaaaacaaaaaaacaaaaaaaaaaacggcagaacagaaaacaacccacaggcacacagcagacagaaaagcaaaggaccgaaaacagcccacaggaaccgaaacgaccgaaaaagcgacccccaacggccacaaggcgacggggcacagacacagacgcccaaaggcaaagagaccacgcccgccggacccaagaaacaagaaaggacacccccagccacccccccccagagcagcaaacgcaacccacagcacaaaaagaaaaaccaaacacaccccacagaccaccccacacccgagaaacacccgagcggggcccagaagagacggagcagcccaaccccagccccagcaggaggacagcgaggccccgcgaggacaccagcagcgaccaaaaaagaccacgacagggaacaaagcaccccgaccgccgccgaggagggcgagcacagccgccacggggccagcacggcgcagcacacccaaacggccaggaaccccggaaaaagccacaccgcacacaaaggggcaggccccaagagaacaaaaagcaggggggggggggggagaacacaaccaaggaaaaaacaaggagaagccaccacaaacaacacaaaaaaagaaaaagcccagcaaaggcaacaaagaggaacaaagaacaggagcaagagaggaggagggcgaacggcagcaggcagaggaaggcacagaagagaaagaaaaaaggagccagcgggacaagcaggacagcaaacccacagacaacagaagaggcacaaagccacgagcaagcaccaacacaagaggaaaaacggaaaacccacaagacccgagaggagcagcgccgaaacacgagcagaggagaagcacggcgcaagcggaaagggggagagcagaggccaacacgaggcccccacacgaagacaacaagccacgagcacaaagcccgaggcagcaccacggccagacccccagacggggaagcaccaccgcgccggccggggcggggacgagccaggcccgcgcacagcaagcaacgccacaaaaagagcacaggcaaaaagacagccaagaaaagccagagcaaagccccaaaacagacaggagacagagcagcaagaaaaggagagaaaccgaacagagcgcagggacgccgccacaaaccagcccccaaaaacaaccgcaacggggaacggggcacgcaagacacacccagaacacaacaaaaagcaggacaagagaccgggcgaccaaacagccccccacacagacacccaaaccaagagcggggagaaacgaagccgagagacgaaggccacagcggcaacaaacaacagggaccccggacagcccaccccacaaggcgacacaaccaagacagaaacaaaaggacgacccgaagccacagaaaaacacaaaaacaggcagaaaagaaggagaaaagaaccacagggcggaaccgcaagggaaaaacggggacaaaaaggcaccagaaaggggggggggggcgagacagggccggagcccggcgccggaaccaccgagaccaggcggcccgaaccagaaaccgccgcccacccgaggcgggaaaaggcagcgccaccagcccagccagaaaaacaagaaaaaagaaagccgagaacgagcacacaaacaaaaggaaaacaagaaaacaacaccagggaaaccagccaacaacaaaaacagagagccacgagcagcccacacaaccaagaggacagggaagcagagaaaagacaccgaacgaagacacaggaaaacaaaaagagacagaaagacagacaaagagggaggaggaaaacaaacagacgaaggagccgggaaggagcacggcccgcaggaccaagggcagggagagaggcgaagcaagaacaagaagacaaagaacaggcaggcaacggacaagaaaccgcaagcagagagagccgaggcaggggccgggaagaggacaaggacagaaaaaccagcaagcagagaaaagcaggaggcaacgggccagaggacgggccgaaccgagagaaaggaggaggccgggcggggggcacagccaacccagcaacggggaggcagaggcaggcaaacgagccgaggccagccggcacaaaggagccaggacaaagccgcggaaaaaaaaaaaaaaaaaaaacaaaaaaaaaaaaaaaaaaaggaagaaagaaagaaaggaggagggggggcagacaggaaaacgcgacggcagaacaaaccacaaacaaggccccagggccagcacaaggagaaaacagcaaaaacagaaaaaggacaaacaaaacgcgagaggggaagcgcagcaacaaaggacagagcaaggacacagaagagccaaaagagagcggcagcaaaagaacaaacaagcaggcacacagccgccaaggcgaaaccgcaagagccccacggccgaggagggcacgccgagcagcagagcagaaccgcgcgaaagcagcaggacagcagcagccaccacagcaaacagagcgggaggaggccacagcagaagcagcgccgcagcagcagcagcagcggaggcgcagaggcggaagcggaagcagcgccgcagccgccgaagcacagaagcagaagcagaagcagaggcggaagcagcggaagggaagcgcagacgcagaagcaaacgcaacagagcggaagggaagcgccgaagcagaagcaaaagcagcagaagcaaaggaagcagcagaagcagaagggaagcagaccgcaaagagaagcgaaaccgcagcagcagcagcagcagaggcaacagcacaagcgcgcgcagagcccacgcacacggcccggagccgacccccccaaccaagaaacaggcggagcaaaaagggagaagacggaacagcaggccaggccacaaaaggacagacagaccacgacagaagccgccaccggagaagagacccagaacagaaacaaggggacagccgcggcaaaagcccgcgcaagcagggggacacaccaacaagcaccggaaagcagaggagacgacgggagcccaaacagccagggcacacagagaaaccgccaaaacaaacaaacaaacaaacaaacaaacaaacaaacaaacaaacgcccggaggcgggcaccaacacacacccaggaggaagaaaaaaaggacagagaacccccagcagaacaaaagcagaagagacgcgacaaaagagagggaaaaaaggaacccaccccgccacacagccccgggccacaagccacgggaccgggaagaaacaggaaggggccgaaagcagaacaacgcggccacacccaagggaggggagcggagagcgcaagaggaccggagacccccaaccccacccaaccacgacgacaccgagggacagcaggaaggcgccagcaccacaccacaacagcaggagaggaacaaagccggaggagcacaaggaggggggaccaccagacagggcccagaaaacccacgaaccagcaaacaagaacggaggaggcggagagaggccagcagcaagagacggaggccaagcacccacgcaggggccacacgcgaaacccacccaggggaccaaccccgacccaggggagcaccaggcaacaagggcacaggcaacacaacccaagcaacagaaaagaaaaaaaaaaaaaaaaagggagggcacagcaaccagcgcggcgagagaagcaccccccaccccaccacccgcagaagacaacaacaccaggccgggagagagagaaagagaacgacggccgaggacccgccacaagagcacgccaccagaacagcccaccccagggacagggagaagcgaacaaaaaagccacacaggccagaacaagaaggaaccagcggccaggcaacaacaaacaacagaggaagggagaacaaaacaaacagcggcccacaacaaaagacccagaaacacacgcgccgcacacacgcacacacgcgcgcacgcacaccgcagaagcagcccaggacggagacgggccagcagaagagcacggcgccccagaggaccccggagcgcagcacccacaagcagccaaaaccaccgcaacaggcagggaaccaggccccacgaccggggcacgcaacacagggcacagacaaaagaggcaaaacaccaacacaaaaaaaaccgaaagaaagggccacaggggccaagcaacggccaagccagaaggcaaggacaaggaccgggacggggacaagaaggagagccagggacaagacgaggggggaaaacgcaaacaaggggacaaccccagagcaccccgacagacagacagacagacagacagacagacacaaagaagggggaacacccaaggggcagcagagagcaggggagccccaaagggcaggaaagcccgagcgaggacgaagcgccccgcgggccccgcgcgaggagcacaccgaaggcaggcagccgcacacaccccgacgagagcgaagaggggaggagggccggcagagcgcggagacggaaaacaacccccaccagcacgaggggagggacacagaacaaacagaaagaacaacacagaccaaggcagccaccaaacccacggccacaaagaaaaaacagggcgcagaaggccgaaggcagcccggaggcccacgcaacagcacagaaaaaaaaaaaaaacaagaaaaaaaaccccagccagacagaaggagaccagaggaacaaaacaacgcaagaaaaaagaagccgcaggcaaacaaagaagaaaaccgaacaagagcaaacagccggcagccggaaccacagacacgcaccgccccaaggcgggaaaaacgggccaacaccaacaaaagaaacaaaacaaaagaagcgacagcccaggagccaagacagccaaagcagcggggggggggggggggggggcaggcgcacacagcccgggaacagagagagccacacacgcagcccccccagacaggccccccgaggaagagacccaaaggggaaacgcaaaaaaagaggagccacaaaaaaggagccaccaggacaaggagcccgacggcaacaacccccaagacacaaaaacaaggcaagccggagagaagagccaaaaaaaaaacaaacaaaaaagaaaccaacagaacaagcacaaaagaggggagcacaccgcgcggaagcaacccaacacaaccacaaagacaagcaaaaacccagcgacgaaggcagcaagaaaagaagacaggagagagccaccccacaggcccggaggacgagcaaaggcggaccgggagagaaaaccgccgcccagacgccccaggacaaaaagaccagaaacagaacaacaaaaggcagaggaggaaaagaaaagacaaacaagccccgggaagagccccgccccaacccagggcgcacgacagccacaacccaagcacaaagaagaaccaacaagcagccaacacaaaacaagagcagggaacgcacagagggccggagagcggccagggggaagagacggcgcccccaaaggaccgaggacccaccaccaaaagagccacagccaccgaaacccagcccagggcaaagcccccccaccccaaaggcaccaggcacaaccagagacagcaacagagggaaaaccaacacaaaaaaaaaaaaacgaaaacacacaagaaaagaacaaaaaagaaaagaaagaaaaagcaacaaaagagcaaaaaaaagaaaaaaagagcaccagaggcgagcagccagcagccacaggggccacaaccacaacgagacgagccccggagcgaaaagaaaaaaaaaaacggaagaaggaaagaaaggaagaaagaaagaaagaaagaaagaaagaaagaaagaaagaaagaggagggggagagagaggaaggaaggaaggaaggaaggaaggaaggaaggaaggaaggaaggaaggaagaccgaaaccgaagccacacgggagacggggaccgcggaccaagcggaagcggcacagacagccgccgcccccaaggcaaacggcggcgaagggaaacgaaagccaaccaggccaaaagacagcccccagaacacggacgcacccagacccaggggcgacgcacacagcccgggacagagagagccacacacgcgccccccagacaggcccccccgccgaggaagagacccaaaggaaaaaacacacagcgacaagcccgaacccggagcgacagccgggaacaaaaccaaaagcacccaaaaaaaccccacgcccaacaggccgagaacggagaccagaaacaggaaaggccaaccgagaaaacaaaaaagcaagaggcagcacgcaccacggaccggcacccccagcacccaaaagcccacacacaagacaacaaacagaaaccaaacaagggcagccaaagaccaagaccccaacaaagaagagaaagcagggagggggccgacccaacacggggagccacagcagggggcccggggcacaaggagccaaaccagcagaacacacaggaaaccagaccaaaaaaaaaagaacaaaacaacaagcgagcacacacaaagaaaaacagaaggaagagcagagcggccagggaaaagccgcacgccagaggacccagggggcccagcacgaaggcaggcacagccgcgaaccagccgcccaccgggcacaccgcccaccgggcacaccgcccaccaggcacaccacaaaagaaaccacaagcaggagcaaacaaaagaaaggcagaaaaggggcacccaaaaccgacagaagaaaggggcgaggaagacacaacggcccggaagcggaaggcacagagggaccaagccaaaacgccaccgaggaacacagacagggagaagcaaaaacaaagcacacagacaacaaaagccagagaacagcacaccagaacacaaagaggggagacccagcacccacaggaaagcaggcagaaaagggcccaccgaaacccacccggaggaccagagccggcgccagcaaaccagccaaaaacagggagcccaagacaagagagagaacggcaaaaacgaagaaggaggaggaaggcacccaagacagccgagcccacaccaggcagcagcaacccacacacaacacaggggcacacacaacacaccacaccaaacacaaaaaaaagaaacaccaacgagaacccaaaaacgaaaaacaaacagcaggggaagaacacaacgaaagccagcacgggagccaacccacgggggggagaagggggggagacaaagcagcgcccggcgccggaacccaaagacaagacggccagaaccacagagacgccgcccaccggaggcgacaagagacagaccacccacaaggaaagaccacagaaggcccagaagccagggcccaaaaaggccaaagaagcaagacccagcaacggagagcagaggggagccaccagggggcggaaacaaccggccccaagagcagccaggcaaccaccgagcgagcaccaacaccagccaccacccccaaaagcaacaggggcggagagaggcccagcagaagagcacgacgcaacagaggccgagcaaccagcaaccacgggggccaaaccacgcaagggaccaagcccccggggcgaggacagagagggaccacaacaaacaaaaaaaagacacagcaggaaagaaagaaaaagcagcacaacacaaacacccccaaacaaccccacagaaacagaaggaaggcaacggagagaaaacacacaaaagcagaggagagcaagaaaacaacacaagaaaaccagacaaaacacacggcgacggggccacaggccaaacgcagaggaccccacagaaagacaacaaaagagaaggaaaaacaaaacggggaaaggcagacagaaagaccgaaaaggaagaaccaaaagagcacgcgacaaaccacaacgaacacagaaaagaaaacgaccaaaaccagcaaaagagcaaaagccaaagacaaagccgaaaaaaccgcacaaaacagaccgaagacaaacgaaaaccagcaggggaagcgacccagggaagggcacgcaccaagagaggagccaggaaagggagcgcgaaggaagggcacggaacaagcgagggcccccagccgggccacacaggggaaagagccccccccgggccgagaggacagccccggcgcccaaacaagaaagaacccagcacccccaccaccacacgccgcaggcgccagaaaaagacaaaaacaaaaggcaagacacgagacgcggagacacagaaagcaggcaacgaagaaagacaaccagacacacacacaagaaagcacggcacccaaacaaaaccaaaaggaaccaccgagaaagagcagcagacgcacgcaaaggagaaaggcaaaaacgaacgacaaagaaaaaaaacacacacacaagacggacggaaaggccgagaaacgcaaaggaaaaacagacggaaggcaaaaaaaaagcacccaaagacacaaaaaaagacagacaagacgaagacaagaagacgccaacaagacaaaccaaagacacacaaacaagaaaagaacaaccagaacagagacaggcaagaaaacacagcccaggacaagacacaacaacaacaagagaaaacagaacaaagacccgcagcagcgaaggaagaaaaaagccggcgcaggaaaccagacagggaacgccgcagcaggcaggcccagcccacccacaccacaaagaaagaccaaccaagcgaggagaggaagaaagccacggggcgccgagaacgaccgcccacccagcccggagacacacacccacacccgaaaggggccccgaaagcaaggcaagagcaaagagccacgcaagacagcgcgaaagagcaaaccgcaggccccccacgagaccagccagaccaaccgaaaacgaacgcgcacccaacccccagcggcaaacgcgggacacgccaggcagaaaccagcacacacccagcgaaagaaaacacaaggaaaccagagggaggagaccaagaggacagacaaagcacgagccggcgaccgagcagccacaagagggaggggacacgaaaacgccaggagccgaaaagaggcagaacacagcaccgcagagaacgaaagaaagagcagacaaagcagagcgcccaaacgggacgagagagcaaaaagcagacaaccaaaggcagggagacacaagaaaagcggacgaccaacacaaggcacgggggcgagagacgagacagggcacgagagccggagacagaacacagagacaggcggcgaaccacagagaccaccaggcgggaaaaggcaaagcaaggacaaggcacgaaccaaggggcaaaaaaacaacaaaaaaaaagaaaaaaagacaagccaacagaaagaacaaagacaggaaaaacaccaaaaaagacaaggcgcaaaacaaaaaagccaaaacaggcaaaacacaagaaaaacaacgaaccagaagaggaaacaaaaaaaacaacaaccaaaacacccacccagaccaaaaacaaaggaggcaagaccaccgagaacggacaaaaacaccgcacgccgcaggaacaagggcgcgggagcccacgggcaacaaaaaaagaacaaaaagaaagaaccaagaccaacgaacaaagaccgcaagaaagacaacaacaaggccaacagaacgccaggcccaccccagagaagggaacaacagcccggaaaaaacaacaaagccacccacacaccacacacacaccacacacacaccacacacacaccacacaacaacaccacacaacaccacacacacaccacacacacacacacacacacacacacacaccacacacaccacacaacaccacacaacaacaccacacacacaccacacacacaccacacacacaccacacaccacacacacaccacacaacacacaccacacacacaccacacaacaacacaccacaaacacacacaccaccaacacacacaaaacacacaggagcgccccagcgccggggcaagaacggccgagggcccggagaggcccccaccacgcccagccacaggaccacagccacccgacagaccggaggcaccagagggaacggcacaaagaggcggcgaaacggaaccacagcgggcccaaacagagaacgcaacacccaaccacagaggaggggagccacaccggcgcagcccacaagcaccggaagcgagcccacaggggccaaaaccacaggacagcacagccccgcgacagcaagagcgcacacaggggcgcggcggccagacgccacacgggccaccacgggagaaggcggaacggcaagaaccacaccaaaggccacgcaaaggacgcagcaaagccgaaaagccgaagagcgcacacaaagccgaaaaaacacccaaaacacagagcagccaaaaagaaagggacagcgaccgcaaaagaggcgaggccagcgggaagaggccccgggagcgccgaaaggggggcccccgccccgccgccgcggccaccagcaccaacaggccacagccacccaccaaaagccagaggaccaaggacccgacccccggaccccaagacagcggggcccacacaacacagggaaaacaccacacaaaaaaaaaaaaaagacaaaaaaagcaaaaaacgcaggagcaagggcagcgggagcgaaggggggacccggcaggcagccacaggccacccaccagcccaaacccgccgaacccccagggggcccaaacaaggccggagacagccggggcccagcaaacacagaagggagccacagcagcaaggaggacaagggccccaaggaggagcagagaaagagccaaggagcaaagggacgcaacccaaggggaacaacaagagcaaccagaccccggagccgaccagcgcaaaacaaaagaggccagcggccacacggaaagagaggcccaggacgcaaacaagccccagacaggggaaaccagggccaaaaagggggagggggggcaggggagggggggggggaagggggacggaagcaggaaagaaagagaaaaccaaaaaaaaggaaaaaaaagaaaaacacaagacgaagcacgagagggaaaagaaggaaaagaaagacaaaaaggaaaagcaaaccgaaccgcgggggaacacgggaagcaccccgcaaaaagccccaacaggcggccgagagccaggaaagggggaagcccccgagaaacaaacaaaaacaaacagcaggaaaggagaccaacgaagaaaaaaaaaaagcacaggccaacccccgccccagcgcagccccacaggcgcccccccaaacccagccacaacccaccaaaccgccaacgccccgccacgccccgccacgcccccccgccgggccccccggggccgagaaccaccacggcggggcccaagaaacgagagccgagaacagggggcaacacacacgccacgcccaaccaaaacacggagcaaaggaccgggaggagagcaaacgccccggagcagaccaggacaaaaaaagaagccgggcgggggcgcacgccaacccaccaccgggaggcagaggcaggcggacgagcgaggccagccggcacagaggagccaggacagccagggcaacagagaaacccgccgaaaaaccaaaaaaaaaaaaaaaaaagagccaggagcaccacagagacgaacacccaaaacagaacagaaaggccaaaaaagaaaccccgacaaacccacacgacagccagggggagacgaagaggacgggcccagggaacaggccagagccagaagcacaggagggaagaaggcagagccccaaagggcaggaaccagaaccagcagggacggcccaaaggccccaggaaagcccaaaaaagacagaaaagagcaacgaagggcaaggggcagcagaaaaccccagaaaagcaccacaaaacaaaaccaaaaaaaaaaaacacaagaacaaagaacaggaaaaaaggcagaaaaaaaaagccagaacaaaaaacaaaacgacccgagagcaggagcgcaagagagcaacaagccgcaagaaggacaggggccacgcccagagggcaggagcaaggaaggagcagcggacaaaggagagaagagggccggaccacccaaacagcccaaacgcgacaccagcaaacaacaagagcgaaaggacccagaaagcgccggagacagccggggccagcaaacacagaagggagccacagcagcaggaggacacagggcccccaaggaggagcagagaaagacccaaggaacaaagagacgcaacccaaggggaacaacaagaacaaccagaccccggagccgaccagcgcaagacaaaagaggccagcggccacacggaaagagaggcccaggacgcaaacaagccccagacaggggaagccagggccaaaaaggggagggggggaggggaggggggggagggagggggacgggaagcaggaaagaaagaggaaaaacaaaaaaaaaaaagagggccgccaaaaagcagggcacaggccgaacagagggggggggaccaaacaagagcgcccccaaaagagcacacgccaaaaacgggaaaaaaacggccgcacccccaacggggcaccgccgcaggcccgaaccacccacccgaccggcccaccgagacacaaccaacaaaagcccgcagcaaaagcccaaaaagaaacccggggacacaaaccaaaaaaagaaaaaaaaggaagagaagcaaaaaaccaacaaaaggccgcaacagcagaaacagaagaaaccgagcccgaaaagccgaaaggaccaaccggcgaaacccagagccccacaggaagccgagccgggagaaacggagccagggcgaaagaacgcaaaacaggagagggcggaaacacaggagggcaccgggccaagggcgcggcaaggagcgggaagcagaacggcacggacgcaagggagggcaggccaagagcaccacagcagggacgcaccgggagcaaggcagccacacagccccagcgagcggaggccggggacaaaaaaacagcacaacaacgaaaaagcacccacaggccgcaaacccaacagagaacacacaaaaagaaaagggcaccgagagacagggcaccagggccagccgccgagcaaacccgcccagccccaagagaggaacagggggaaacagcaaaagaaaaggaaaaacgagaagcaacaagaagaacagcaccccacccccaccaaccccccagaccaccccaccccgacccccaaccagcggggggaaaacccagcgccccggccacccaaacgcgggacacacaccgggcgggcgacccagagaaaacgaccccccccccagaagcacaagcccagcccgagaaagaggggccaaaaccccccccacccagcccaaggcgacgcaggccgggcaggggacccagcgcggggcccgaggcagagcccacaggccagaagacacgcaccggcccccgacccggccacaacccaggaaggagccagaccaccaagaccccagagacgagaaaagacaaaaggaaaaagggaccgcggccgccaggcgggacggcaggacagccaggacggagccaggcggagcagcgcggccggggacccaagcccccggacggacagccaggcacggcgaagacccagccgccaacagacagcgcgaccgggcgaggccacccccccaccccacccccaaaaaagcaagaaggcgacccaaaaacgcggcaaagcacaacagcaagacgccgggcccagcagcgcccccagccacccggcccccaccaacaccgcacagggaaccgccagggagacacagcccgccagacgccccgagcccgggaaggggggagcagagcccggggcgagccgaccgcacgagagagagcggaaccaaacacgcagaagcaagcaggcgacaccaacgaaccagccaccaagagaggcggcaggcgcacgcaggcaaaggcagccccagagaagagaccacccccaggggccagcgcacaagcaaggcaggcagcggaaagaagagcaaggcagaaaaaggagaccggcaaagcacaaccaaaaaaaacagacaacaagcaaccaaagagaaacccagacacccccccccccaggacaaagacaaggccgccccacaggacacaggcacaccagcgggagccgcaagaaaaggagaaagcccagagaaacagcggagaaccaccaacgaccaacggacgccagagcccaaaccaacccagcacgagggaaaaacacacaccccacagcagggggcaacaacaaccaaccgcacaaagcaggcaaggccagcaccgacagccaggggaccacaacaagacagcacaagaaggaaaagaaaagaccaccgcagacaaaagaaggagggggccggagagaggccacggaagaggcgacgcccagaggccgaacaacccagcaaccacaggggccacaaccacgaagggacgagcccccggggccaagagaggacaagaccacaaagaaaaaagaaagaaagaaagaaagaaagaaagaaagaaagaaagaaagaaagaaagaaaggaaggaagaaaggaaggaagaaagaaagaggaaaaagaagaaaagaaaaggaaaggaaaagaaaggaaaagaaaagaaaagaaaagaaaagaaaagaaaagaaaagaaaagaaaagaaaagaaaagaaaaaaggggaggggcgggggaagcgccgggggcgcgcagccaggcacggggaggaagcagaggacaacgggaagaaccacaccaacgggcccaggcaggggggggcagagagaggggacgcggcccggcagcggggcaagcagggcaagggcgcccacacccgagacagaacacacccgccccccacaacaaaacgggaggacaagagcgagccccgccgcgccaagagcccccacccgccaccacccagacaaccgccgcgggcggacaccgacccggaacggaggaaacgcccacgagcacagcgccgacaccgcagcccggggagcgcccaccgcgcagaccagcgaggacgggcacgccggccaccccggcacacccaaagcccaggcaggagcccacgggcggggagaagggcccggccgagggcgccccccggaccaaaagaccccaagggacgcccagaggccagccagcccccgccccgcggccccgcccgccccagagagcgaaaaaagccagcccgccccaccccgccacaggggcaacggcggcggccaaccgcccccg

SEQ ID NO: 752 - RNA, 658 nt, Mus musculus
gagaagggcgcaagccacagggcggaacggcccgccacccagcacccccccccccacacccagcccccgccccgccccagaagcggcagcccggggcgcgcgccgccaccgggaagcgggggaggacaggcaaacaaccggcagggggaaaccgcccgcagagcggcggggaggggagcggccaggggagagccgagaccagaggacacaggggccacacacgggaaaccaagggacaccgcacaggacggggcgggccccgggaaacagggagagcagagagcggacaccgaagggagcgacagggcccccgaaaagaagaggagcccacagacgcagacagagcagccgagggggccagggaaggcgacacaggagccccaggacgggggagggaggcccgacagacaccaagccgggcaaggaagaaaggcaggagacacgaaaggaggccgggacacagcgggggcagaaggccgcagagcagaggcagcacccagaaaggccgaaccaggacgcggcaagcaaccccccgcggaggcccccgcggcgcagcaacagagggcgcgagacccaggacgcgcccgccgcccgaaaaccgacaaagcgacacaccggaaagagcagacaaacaagcccccccccccagacaaacccc

SEQ ID NO: 753 - RNA, 3413 nt, Mus musculus
ccgaccccaccccccccaagaacagcggggagaaacaaccgcccccagcgaagaaaagcacagaaccaaagccaccaagcaggaaagagcggccccacagacagcacacagaaagaggagccaaccaccaaacgagagccagaggaagggggagcacaaaaggcagaaaaaagacaaaaaacggcaccgagaaaagggaaaggaacaaaaaaagaagaaacagggcaggaaccgaacagggaacaaggaccaggcccaggaaggcaagacaagaaccgaacaggaagggcaagccaccagggggccgggaacgccagcccgcagcgggcaggcaagcaacgagcacccccagcccaaagccaccgacagggcgcggacaaaccaaccgcccaccagacaacgccaaacagagcacaaaccagccaaaaggggcaagggcacagcagcggaaagggaagaaaccaacaaccgacgcagcccaaagagcggacgcgaagccagcccggcacgcaagcaaccccccgccagcagcgaacaagaggaggagaacagacacagaaacggagaaaaggggcagacaaaagggcaaaggaggaaagcgacggggcacacaaaagccaggaccaccccagccccccagccccaccgcgcccccccagcggccccccgccccccccagagcccacagacgcgcccaccgcccacagcagccacacccgcccaggcacgaaaaaaggacacgggggacaagagggagcgaaagcagcaagacgacccagggccacgaaaaaaaaggagagccggcaagcgagacccagggagaaacccaggggacaaggcagacggagggagggacgcacagcccgccagaagcccacccacaaacgcggaaaaggaggccacacggggaggcgaggacaaaagccacacccagagacaaagcaccagacaccacccagccaagggcaaaaggaagacggcaacgaaggggaagagagaaggcacggggggggggagggccagcgcgccgcacaccaaagacagggggcccggagaaccacggaaaccagaccaagggaagaaagaccaacaggccaggaccagcccaggaacgagacccccggagacaacaagaggccggaaaaagagcaggcggggcagccgaagccacagacgagggagcaaacaacagagaacgacagacagacggagagccaagaagaagggacagaaaggacacacagaccgcccacaaccaggaagggagccagcagccccccccccaccccacacaccaaggagccagaagccagaggcagggagaaaaccaaaacaagagcaagcccgcccccaaaggcaggcagagagggcggcacaaggcaaacacagacaaaaccaccaccgggggggggcgcccagacagggggcagaaacggcaagcagggccaggccgccagccgcgaaaagcaggaggaaaccagccacgcgcacaacacaggccgaggccaagcgggagacgcccagaagacaccggcccacagaaaaacccacggccggcaagccccagacaacccacagaagcacgagcaaaaggagcggacaccaaggagcaccagagcacgaaacccagggaaagcaaacaaccaccaggcacaagcgcaggcaacagaagaagggagaccccccgacagggacaacagcccagcaacagccgagcgacagagaagaaaggagcgaagacacaaggccagacggaaagggccaccccaaggcgggcacagccgacaagagggaagcaagagaggcccacagccacagaaaagaacccgaggaaaccaagacccggcaagaccgcaagcagaaaacaaacacaacgaaacaagaaccgcagacagaaacaacaacaaacagagcaaaaacagggaagaggagaaaaaagaggggccaccacaacagaggaacaaaaagggcacagcaaggaagagagaaccacgccacgacagagggagagggaaaaagcaccaggaaccggcaagcccgaggaaaaaaaaccaacacggaaaagcagaaggaaggcaggcagagggacgcggccaggcagaacaggacaggcccgccagaaggcgagcaagagggaccgccagcaggcgcgaagaaaggaccccgagggcgcgggcgccgaaccgcggccaggcaggcaagcaggacaggagggccgcaccgcccccagagccgaggaggcacccggcgacccacagggcaacaggggaagagaaccaaccgcggaggaggcccaggcaggggagcggcacagcccaacacaggggcgagcaaaccagggcccgcccggcagcccccagagacccaagagggagggggcggcaaccagcggagagaggcggggaggggggggggaggaggcaagagagccagccagggcaaggccgggggaaccagacaccagcagcagaagggagaaaacccagaggcacaccggaacaggccccggaggaaggcccagaacaaaacgggcaggaaaaaaagaacacaccgccggcggagacacgaacccggccaaaagagaacccgcaggcccgggaaagggaggcccccgaagaacgagcccaggcaaccccagagcaacaagaaacgaccccccacccccaccccccgaaagagaaagagagaggcgagggcgggggcaggcggacccagcggcccagaagcgccgaccccagcgccgcacagggacccgcacagagcaagggcaaagccgccccgcccccagcccaacaagcgggcggaaccaccaaggaccaaaaacagacaagcaacaagaaaagcagacgccgggaccacacggcaagagggacaaagaagaggcccccacccagagcccgacaggaggcaggaaaggggggcaagagaaaaacacacaagcacgccggcccaccgaaccacacccccacaacacccagagaccgggaaacggaacccgggccagacgggcccaagggaagccagagggagacacacgagccagaacgccccaggaccacaggggagccagcccccaccagaacaacaggacgacccgccggcgccgcagaaggcaagaggacagcaagcccacagcgaccagagaagacaggacacagaacgcaccaaagccccacaggacggcaacgcacgccaagcaaagaaagaaaaagagcagcagccgggggcgcaaccaaccagcagggcaaaagaagagaaccaaaaaaaaaaaaaaaaaagaaagaagacagaacaagaaaccaaggaaagaccaaagagacaaaaaccagggacgaaagaaaaaccaaagggagccaggaaaccaaagaaggaccccaggacaccagcacgaaagggacacacaaaccaagcaa

SEQ ID NO: 754 - RNA, 839 nt, Mus musculus
aggccgagggcgccggcaccagggcgcccgccccacaggcaaagggaggggccacaacaacccccagacccaacacacggcacagccagcgacccacccacagcaaacaacggcacagcaaggccgagaagggaagcgcacaacgggaagcccacaccacccaggagcgagaccccacaacacaaagggggaggccgggcgagagcgggagcacgggccaccaccaggagaaggccggggcccacgaagggggagccaaaagggcaaaccgcccccgcgagcccccagggagggagaaccacgagaaaagacaaccaccaaaagcagcaagcaccgcaccaccaacgcagccccccggccaagacaccagacaacggcagggaagggccagaccaccgcagccacacgccacccagaagacgggaggccccggaaagcgggcgcggccgggggcgcccagaacacacccgcaccacgggcgccaaggcggggcaaggcacccagaggaacgggaagccacggcaggccccggccacccccaaggccggggacgacagcgccggaaaacccgccaagagagacacaagaagggggaagcaggcacgagggcccacgaagggcacgggcacacgaggaccagggcccgcgaccaacagcaaccccaccccacccgagccggggcggcagcccaaggcaacgcaagccaccggagacaagaaaggcacagcaacaggggggaacccaggcccacaggccccaaggagaagaaacccggaccacccaccccagcaaggacacgagagcaagagagaggcccgggcgaggagcccacccaaccg

SEQ ID NO: 755 - RNA, 603 nt, Mus musculus
  misc_feature (404)..(603): n is a, c, g, or u
cccgcccgaaaaaaaaaaagccccaggaggaggcgggggggcggcggcaaccgcggcggggggaccggggagacgcgccgcgcgcgccgacgcggcccaggcgggcgagaaagcggacccccgagcggggggcgggcgccaccgccgccgccgcggcgcgccgcgcgcggggccgcgccgcgccgccgccgccgccgccggcgagcgggcgggaccggggagggagggagcgggcgagggcgagggcgcgcgggagggcgcgaggcggcgggacgggggcgggcggccgggccccggcggagccgccgccgccgccgccgccgccgggccccggcgcgccgcgcgcagccggagcgcgcgccaggagaacaaaaacccgcgggaagaagcggccggcagcggcnnnnnnnnnnnnnnnnnnnnnnnnnnnnnnnnnnnnnnnnnnnnnnnnnnnnnnnnnnnnnnnnnnnnnnnnnnnnnnnnnnnnnnnnnnnnnnnnnnnnnnnnnnnnnnnnnnnnnnnnnnnnnnnnnnnnnnnnnnnnnnnnnnnnnnnnnnnnnnnnnnnnnnnnnnnnnnnnnnnnnnnnnnnnnnnnnnnnnnnn

SEQ ID NO: 756 - RNA, 21549 nt, Mus musculus
acacagccaaccccggggccgccacccccaagcggccgggcccagagcacaaggggacaggaccggccccacacgcaggacagcggccgcagaggggggccgggcgcagcagcacggcgacgagaccccgccgagagaagaccggcgcagaacagcaaccaggggcagggccccgccacggccagcccccgagcagccggaaggggacgccaccggcccagggcacagcacaccaccccacgggagccagagagcgcgaggacccggcccgccagacacgaggagggacgggcggcagcgccaaccaccagggcgacaggagggaaccacacgcgaggaccgcagagaaaaggccgccggagaacaccaccagaacccaagagcccggggcaaaacagagcacccaaggcagagggacgagaaccggagcgggagagccaggaggagaggccgcacaaacaaggcaccaagcgccccaggcggagcagaggcgcagcacgagggcaacagccgccacccacgggagggccaggagcaagacggacccggcaaggaagacaagggaccaaaacgaaaggaaaaaaacaagccaggaggaaggccaggaacagggcggccagagcacagaccccacaaaagggacagagcaacgcccaccaacaaccaaagcagccgcaaacaggaaaaacaagcaacccagggaacacacaaggagagaacaaccagcaggagacaaggcagagccgccacgaaaaaaagccaaaaaacaggaaggggcgagaaggcggccagccgggcacaacaggagcaaagccgacaacaaaaacacagccgaaaacaaagaggaaaacaggaagaacgccccaaggcgcgggagccaccaagaaacaccgcccacccaggacacaggagacaaaagcacaacacggagagcagccacaaccagcaccacgaggaaggagcaggggacgagagcaaagccagccggcacaagacagagcacaaaggaggagcccgccaaaaaagaagagaaaagagcgacaaaacagacaggccaaaccccagcagagacacaggaacaccccaacgcaagcccaggacccggccaggcacgagcgcaggcaggggagccaaaggggaaagaccacagagcagaggccacaccagggccacaccaaaggcgagacagggcccggagcccggcgccggaaccaccgagaccaggcggcccgaaccagaaacaccgcccgcccccaaggcgggaaaaggcggcgccaccacgcccggccggccacaccaaacaggcccccagaccggcggggccaccccagaaaaccaccccacccaccaccgccccacgagccacggccagggagaagggagggcagaccaggacccagccacccgaagaaacccaaaaaagcaagcccacagcacagagagcagcccgcccccagaagggaacagcccaaggaaacaaaaaggcaccagagcaccgccacggcccccccccccgccccagccccagcagcagaagaagcggcccccccagccaggagcagcggagacccaggacacagacggcgaggagcaagcgcggcaggcacagcgccggcacacaaggaggacaagaccggagggaccaccagacaaacagagaccgagaacaaggccagccaagcaggaccaagggcacaaaggaaccaacccaggggcaccgggaacacacagcaaggggacaagcacaacgcgcaggccgaggacagcccacacaaccaaagccggcagcaccagacacacaacacaagcagacgcccacaacccaggcagagcaagaagaaaagacaagcgggaaagacaagaccacacccgcgaccgggccgcccggccagagggacgcaccggaaacagcagacaagggccccgaagcgcaaaaaccaaaggcagaaaaaaagagcaaaccaaaggagccagccaaccaggaacaaagaaacccaccaaaagagcaaagaaccggcgagagggcacaggagacagagacaggagggagggccccacgacgcaagcccagccggaacaaacacccgcaaggcccggaaaaggaccaagcccggccaaacccgaccagcagggagagaacacagccacaggaagcaccgcgcccaggcaggcaggcagcaggggggaaggcaaagcggaagcaccccccccccgagggcccacaacagccacagcaacggccaaccaagccagacagcgcagcaggaaggccaaagcaagccgcccacacaagcccaccacgccaagacacacaaagccagccagaggaaaacaaaaaaagcgggcaggggggcacacaaccagcacgggaggcagaggcagcagacgaggaagccagcggaagaggagccaagacagccagggcacacagagacacccgaggagaaaaaaaaaaagagagagagagagagagagaggacaaaaaagaaaaaaaaaagcaaggcaaaaaacccagcgaaaacccaccaggaaaagacaaaagggcaaaaaaaaaaaaaaaaaacaccggagaccaaaggacagaggcggcgcccacgcccagaccggcacggaaaaaaaacccagaacgacagaaaccaggacgaagcaggacacagccaggaagcccgccaccgcgagcaaaagaaccaaagcagaggaaccccagacgaccacccgcaaccaagcgaaagaaaaaacagaaagggggggggggggggggacagcacgagggggggaggagagggagcagacccgggagcagggagcgaaccagcgacaggagcaggaacgaacacaggcccgaaaaaacaagacaggcggaacaagaacacaccaggaacaagaaccacaccaggaacaagaaccacaccagccccacggagggagacagggcccacagcggcgccagaacccagccaggagaccagcggccgaaccaagagacgcccgccaccagcacggaaaaaagaggcaccacaaaccggcccccagaccccaaaaaaagcgaaagcacccgagcgaggaggccagaggcggccagcgcagagcaccgggcacaccagcaaacaggaggcgggcccgacaaagacgacgacccccgagcgccccccgagggccaccaaaacggagcagggccaccccaccccccaggagaaggcaaacccgccaaccgaaggcaacaaaaaacaaaagacaaggcaaaagaccgggggcaccaacaagccaacgcaagccgaaagaagcaggaggagcccaaaccacccacagcggcacgaaacaccaacaagggcccccccaagggcaagcaaagagccccaaaagcagccccccgaaggcaagaggcaccaggacccccaggggggccaaggacgcgacaggaaagaacacacgcaaccaacgaagccaggaaggcaaggaccaccacaaaaccgaaaaagacacagggcggagaggggccaggggaagaacacgacgccccagaggccgagcaacccagcaaccaaggccacaaccacgaaagggacgagcccccggggcgaagacagaacaggaccaaaaaaaaaaaaaaaaaaaaaaaccaaaaaaaaagacgaaaaaaagcgaaaaacacaaccaccgaaaggagcacgagccagccccagcccacagccggagccggccagggccaccagaagccacacgagagcacgcgaggcaacgcccagaaaaaccagcaccaaacaacaacgaaaccagaagaagcaaggccacggccgagagcgaacacaaagcacaacagacacgagggacaaaggacagaacaccagaagaccgacgcaaagacaaaacaagacacgcaaaggccgaaaacgccaaaagagaaggagggaacaccacggaccacccgcacggacgggagccaaaaagcccacagcccagacaacacacggcccccagagagcagccacgagaaagaaccaagcaggagggaagagaacgcgcgacacagcaagggcccacaggcagggacggccagggcccaaccccaccaggaagagagccagaaacgccaaggcaccgaacacacaacaggccggacaaaaccccccccgggggcaacacagggcccggagccgggcgccggaaagccgagaccagggggccgaaaacaggagaccacccgccccccacccaacaacccccccccgcccagaaaaaaagcaggcacaaccacccacaacccaggaagacaaaaagggcggagacaaggcgaagaaaggcaccgaacggaacccagagaaccaggagcagccagcagcacacagcagccacagcaaccaacccagaacaggggacaggccacccccagcccaaaggcacacacagaagccagaaggcacacagaccaaacacccaagcccgcaaagcagcaaaggagagccaccccgacccgagaaggacaacaccacacagcaaggaacaacaaaccgccaaaaaaaccaaaaggagagggggaaagaagcagggagacaaagggcagacaagaggaagcagccccccaacagagcccaagaaccaaaagcagaccacaggcgggggggcaagggccgaccgggccacccaaggccccaaaccggaaccgacccacaacaccaagggaaaaaggccaggccaacccagcagggggggggggggagacaaccagaaacagcacaaaggccaccacacaggcaaacacacgaaggcaagggagaagaccgggcaaagcagcccaacccaagccacagaaacacccaacccaacagaagagccagaggacgccagacaaaacccaaccccaaaaacggaaacgccgaccaccacgaacagcaggggccaagaccagaccaaaacaaccaaagaacacgaaacaagccaaagccccaggacgcaaaacacagggacaaagacacgaaaaacaagagacaagaggagcagggcccaagccacagaaccgcgcagggcaaccgacagcaggcgagacgccaggaccaacgcaagagggaaagggcaggagccaaaggagcaaaccccacacaccaggcacaacacagagacacaggaccaggccagccggcacacgacacaaaaacacacaaacacaccagcacacacgcacacacacacaggcacaccacacaaacgaagcccagggcaccaagaacacaacaagccaccccaagcgcccaaggaaagggcagagcaaacagagccaaaacaccaagaaaaagcgagccagaaaaccccacgcccaggcgcacgcccaacccagacgccccccccaaccaaaagaaaaaagcagaccgcgcaccaaacaaaaaaagaaaacccaaaaaaagaccacagcggaaagaacagaagagaaacacacacaggaaaaaaaacgccaccaaaacgcgggccggagcacggaccaccagaggcagacaaagacccccagaaacgacagccaccggccaccagcacccagacgaaccacaccacagcacccgaagagaaccagccgacccggggggggcaggccaaagcaacggaaagcaaagaacaaagccaggaagaggaccaccccgcacgacaccgccagcgcccgccaggcagaaaccaccacaaaaaaccaaacggccccaaacagagcccaaggccagccgggcaggaagcaacagccgagaaagcgcagcaacaagcgccaagggaagcccaggcagcacagcaaaaggggaacgggagcagcggcaacagggaccccccccacacacacacacacacagcccccacgggaagcaaacaaccaagagcgagcgccacagaaggaggaggagaaaaggaggaccccccccacccccacaaccccaaggcaagacacgccccgggcgaacaaaacccggcccgcaaccagcaaagccggcaaacggcggccaagaaccaaccagacaccaacgaaaggccagccagccccacaggcccccacaaggaggccaaaggaaccaccagacgcccacacagcaaggccaaagacacccggaaaaacaccccccacgagcaaaacagaacagccaccccgaaaaacaggagggaagggagacgaggcccccacacacagccgccggccgagcaaaccaccggcacaaaaaggaagaaaccaacaggagagcggccccaggagaaacccaaaagaaagaccaacgccagcggacacaacacagaacaaagcaacagacccaaacgccgaaggccgaccaaagaggaaaagccacgagccagcccacccagaaaaacacacaagccacggaaaaaacgcaagaggaacaggaccagccaaaaacaaaaagcaggacccaaaaaccaaaagcaggccacacagcaacagagacgaaaacgaagaaaagccagccgccggaaacccagcccagcagacgaaggccccagcacggcacagcagcacacagcagaaagacgccggaggcagcaagggcaaaaacacccaaagcgcaaccaaacagggaacgaggaggaaaagccgccagaaagggaaaaaggagccacggaaccccagccaacaggcagcccgaagaagagggcccggggggggaggcagcccgcgggcaaaacagcaccaccaaggaggagggagaaaaggaagcacacgccaggagacagagccgagcacgagggccacgaggcccaaacacagaaagagacgagaagcacagaccccaaaacaagcccacggaaaggaaggggcccaccaccccaagccgccaaaaaggaggcaacaaagaaaagcaaaccccccccggaagaagccagagcagaaccccccccccccccccaccaccgggaggggagaaaaagagagagagcaaaaaaagaccagcaaaagggaaaaccaagggacagccaaagaagaaggaaaggggaaagcgaagccaagacaacagggaggcgaccaacgccagacccacaaaggaaacacacgcaaaggggagaggaggaggagaaaggagaaagaaacgggccccccagcaggccccccgcccccccgcacacagaccaagggcagcaaagagccaaaaaggaagcccagggagacaagcaacaccacaaccagccagaggcacgcccggaaacacaaacggaaagcggcagcaggggagggaccaacaaacaggacaaaaaaaaccaaaaaaccagaagccaaaaaccaccaggcccacagggaaaaaacagacaaaaaaaacgaccccagcaggagggggaaaagcacaccagaaggacacaccaaaagccagcacagaacaagcaccaacagggcgaagaacacccccagacagaaagcagaaggagccgcacgcacacaaaaaaaaaaaaaaaagaaacagaccgacaaccccgaaacaaaaacaacacgaaccaaggaccaaggggcgaaccgggaaaagagcaagaaggcgggacgccacaaagagagggaaaggcccccgaggccccaccaggccaggcaggccagcagcgggcacccgcccccgggccaaccagcaagacaaccacccaaaagggagaagacaaagaacaaccgaacaaacagaccaggcccaaaacaacaacaaggcccaacccacccaaaccaggaaacggccacgggaccggggacacagggcccacagcccggaccccaagcgggccccaacaacgcagccaggaagccgccagagaaagaaacaaggccacaggacacagcccaagggggaacgaccaccccgagcccccgacccaaacaaaaaaagaaaagcacacgggaggcggaccggcccccacgggggcccagaaggggcccccgggaccggccaccaggaagcaaacccgggaaaaaccccgcccgcgccccacccccacccccccgcccaagaagcgccccggcgccgagggcgaggcgggggcgccccacgcgcgcccgccgcggaggcaaacgaggcgcacggggcggcgccccggaggcgggccgcccccgccaacccgcacgaaccccacgggaggcgggacgcaaggggaggaaaccgaacaccccggggcaggacgcagccccgcaggggcccggacccccgacggccacgccgcgccgggcaggccagccggccgccccccagccccacgcgcggccgcagccgggggacgcggccccggcgccccaccgcggccgccggcgcaccgcccagccgcggggcgaaggagcggcagaggcggcgcggccggcgcgccgcagccccgacggcgcggggaccgggacggggccgcgccagcccgcccccacggccgcgggcgccgggacccccacccccacagaggcccggggggccgggccaccccggcgcggggcgagggagcggcgcgggcgcccccaccgccgcgcggggacaggcaggcgcggggcccgcgcgggcgggcgggcggccggcgccggcggggggacgggggcagaaaggccgcagcagcggcgccccccccccggccgcgccgccgacgccccgcccccggccacgccccccggaccgcgcgggcgcaagcgcgccccgacccgcccaccgcgcgggccacgcccccccggaccccccgaggcgcgagccccgcggagcggcgcgcgcaccccaccccaccccggggccccgcgcacgcgcgccccgcgccggcccgccaccggccaacgggcgcgccgcgcccgggcggccaggacaggacggggaggaggggggggcgcaaacgcagcacgcaggcgcacagccagccccccgccgccccccccccgcaagggcgccccgggaggggagggaagaggaggggaggggccgggcccaacccccggcgcccagaacacgaacaacaacaaaaaaaaaaaaaaaaaaaaaccaaccgccacggccgggagccacaggaagcgggcgagggggaaggaacaccagagagcaaggaggaaggccgagaccaaaaagaaaaaccaaagaccaaaaagccacccaacacccgggcggcaaagcaacgaaggacggaccaaaaacaggcagagaaacagaggaaacaggcaaaagggccaaaaacaaaaaccacacaccagcccaccacaaagcgccccggccgaccgaaaagagaaagaagaaagacaggaaaagggacccaaaggccgggacgagcccgaagcaagccccagggaggaacaggcggccacaacacaccaaaacgcccaaaagcaaagaaccaaagaaaaagaagcaacaccgaacagcaacggccaagcggccccgggacaaaaaggggaaaacacaagaaaagcaacaacccaccaaacaaaaagaagcgggggggggggggaacgggacaaaaaagaaccgaccggaacggaagcaacgcagccaaaaaaggaagaagaacaagaagacagcagcaaggggcaagaaccgccgagaaggcgcaacaagaacaccaacccacaaggccgagccaaaggaaggaacaaacaccacaaaaagcacgcggaagagaccaagccagcccgaccaccaagcccagaagaagacaagacagggccccaccacagaaaacccaaagaaaacccaaaaacaaaacaaaaaaaggaaagccaaaaacacgacaaaacgcaacagccagcaagcacaaagcagaagaccaaacgacccccccaaaaaaaaaaaaaaaaaaaaacgagggaggggagcgcaaaaacaaagaaaacagaccaagaaagggaagagggagccagccccagaaggaaaccgcaccgaagccgaaacgaaacacaaagcgaagaaaaacccaggggagagggacagaaaggaaagccaaacgccagcagcaacagggaaacaacaaaagacaaacaacaggcaagaacaagagaccgggcccagaccgagcacgagacagagaaaggaagaaagggagggggggggcggcccagccccacaaagccaaccgaagccaggcacagaggcgacgccacccccccccaccaccacaaaaagggggagggggacacaggagccaaaagaaagggagcccccgacacgcaagagggagagaccgagcgagcaaagaaacaaagaacccccccggagacggccaacaaaacgggaaacggcaaaacgccaggacggcgagcgcaaacacaaccggccaagggacaggagagacggaaccgccagaagcggaggccggcccgcggagggacacaaaaaagcggaaagcacagaagaacccgagggacgggcgaaaagcagcaagaacccccacccgggcgaagggaaacgaaaaacgaacgggcccacggccggccccgcccacgcggagcccagccgccacaccaccccaggcgcgcacccaaaggaacagggccggaggacgcagccacgcagaggggacccggccgcccgcgcgggacgcacggagccaaaccaggcccaaccacaccgacccgacaaacccagccaccccgccacagccaaaacaccaccaccaccccccacacacacacaagaccacccaaaggcgcaaaaccaccgccaaccgacacaggagcaggccgcccaaacaacacgacaccagaccccgaccgaaaacaacaaaaacaagagcaagcggcgaaacacacagaaaaccgagacaagccaaggaaggcagagaaagacagccccaagaacacgggaacagaaagagaaacagcggaaacgaaaccccggagcgcgcagaaacggcgcagacgccaaaagaaccagggaaggacaggaaaaccagaaaaacgcaggcagcaggaaacagaaaaagagccgaaccgcaacaaacacaaagggcacgagagggaggcagggcaacaccccagacgaaaacacaagaaggagagaaacaaagccgagggagggcacccaccccccaaacaaccccaggaagccaccggaaaaacccagaaggaagcgaaaagagaggcagaaaacccaggagggaaggcgggcgggaccggaaaccaggagccagccagccaccggccggaacaaacaggaggagaggagcggacaagcaaaccaagaagggaggggcaagcgcaaagccaaaaaagagggagaaaaccgacgagacaaacaaccgagggcgagaacaccaggacaagcacacgcccgcacaagggcccccacagacacaacgccccccaacgcagcacaaggggccccccgaagcagggaacgccaaaaaacaacaacaccagggaagccccccaaaacccccggccaacaggcccaacgggacaagggaggacagagaaaagacacaagcacgaacaacccggccaccaccaaggagaccacccacacccaaaccaaaacacggaggcaggaaggcaccaaggcggccgacggagaccgcccagaagagacagaaagaggagggaacacacagggcgcgccgagcaggagcccgggccacccagcaggcaggagccggcgcaggccagaacggggaagggaggcagaaaggcaaagcaaagaacagccaaacacaaacgaacccaaccgggcaacaaaaccagccagaaaaaaaaaaaaaaaaaaaaaaaaaaaaaagaggcagaaaggcaaagcaaagaacagccaaacacaaacgagcccagccgggcaacaaaaccagccagaaaaaaaaaacaacaacaacaggccaggcaggcaacgcccagcaccgaaggcagacacagaagcaagcagacggacgaggccaggcagcgcaaggagcaggacccaaaacaagagacccgccaaagaaccaacaaaagagaaaaaaaaaacaaagaaaaaaacaaagaaaaaaaaaagcacaggaaaccggacgccaagagagggccaccggaaaacaaaaaccccccacaaaagccagaaaaaagacaagaacagcaaacgaccacggagcgaggaggagcaggaccccagaagcacccaagcacccaaaaaacccgaacccaaccacccggcccaacccagccggggaccgcgccccaccccgccccgcacacacggacccgccagcccagccggagcggcccagccccagggagagcagagccgccacccgccagggccccacgccgagcaagagggaacagcccagggcggccggcaacccgggcggccaccaccagccgcgccagcggcaggaccccacgaaaccgcacaacagccaacaggccagacgaggccccccagccgcccgccccagcccacaccacacaaaaacccgcccgccccccccccagggcaggacagggccggacaggcgcacccccaccaaacccaggcccaccacaagagcaacaaaacaccaaaaaccgaacaaaaccgcagcccaacccaccagaaaaggaaaggaaacccaccggggccagggcagaaccccagcgccagaaggcgaggcaggaggacgaacaagcaagaccagcgagcagccgagacccgcccaaaaaaagggcggaaggaacaagccgaaggaggcagaggaagggaaccgaagggaggccaccggccagagagaccgccagcaacaaaaaaaaaaaaaacaaaacaaagaaaaggaacaggcagaggaggcagaagcagggagacaggagcgaggagaccgggacaaccaagcaagcagccgacccagagagcgccaaaaaaggacaaaagaaccaaagagcggaacgcaaaacccaacacaggaggccgaagcaggcgcaaagcaaaacaggccggggggagccagggacagcacccagcagcaaggggccgagcccaccccaaacgccaaaagacaaaaagagaagggacagggcagcaagaaaaaggcagcaaaccagaacgcagaaagaacaaccaaacaagaggccaggcgagcaaccccaccccggcccaggcacccaagccagcggcgaaacacaggaggcagaacaagagccgccccggggcacccagagacagacagaagggaacggagagcagaagagagacccccggaaacaggccaggaacaggcagggggggaaacccgagcacggaaagccccaagccagaaaggaaccccaccagccagcacccagcaagaaagacaaaaaaaaaaaaaaaaaaaacagcccggggcgcacagggaaggggcagcagcacaggcccaaggcgacggaaggggggccagccaaccagcagacaggggaacagagagaccagggacaaaggcaagccacacccccaaaaacggggggggggggggaggcaacaaagaaccaaaaaaaaaaaaacaagacaaggaggccagggaggccgggggaaagggggacccggacagagaaacaaaggccaaccccacacaacccagagcgaaacccccacgggcagcccacaccccgaccccaaccccaaccaggcacaggcccgggaaccccgcaggcacccccacccaacagccaaaaaacacaccgagaaaagagggaagcaacagcgggggccagccaaggccccaagccgcaccaccccgcgacgcacacaccagcgcccacggacaaacaaaccgacaacacagccgcccagaccccaggccagaaaaaaaccacaacagacacggcaggacaggggaccacggacccagaagaccacagagaggccaggagcccaaaaccgcgagccaggcagacgaggggaggccagccagggcacagagagaaacccgccaaaaaaaaaacaaaaaacaaaaaacaaaaaacaaacaaacaaacaaaaaagaaccgcgcaacaacaggaccaagcaggccaagcacccaacaagagcaacagaaacagggagccccaagagaaagagacgaaagaacagacaaaaaaagcaagcaaaggaaaaaacccagcgggaaaaagggaaaagaacggagaaaagaacgcagagacagacgaggcggccacaccccagggcggaccgccaggcccccgacgcccccacgagcggaaaaggcagacagcccggaaaacacagacacccaccggagcggccgcaaagagccggaacaccaccccccccaccgccacaaacacacggcaccaagaagcacgaccccgccagcccgaggcagcgcgagcccgccaagacagagaacaagaaaaaggaaaagggcaggaaagacaaaaaacagggccgaccaggacccccacagagcagaaggcaaaaagcaaaagacaaaccagccaggaaggaggcccggccagcagggccgcgaggggaggcagagccaggaggaacagcacaaggaagaccgcggcacagaggggccaaaaacacaacacaacacaaaacaaaacaagcacaacagcaaagaaaagcacgcgccaaacagacggacagaaggagaaaccccaggacagaaaggggccggaccccaggcagccaggcacaaaggggcagacacacccccaaagaaaaaaaaacaaaaaaacaaaaaaacaaaaaaagaccccgacggcagagcgccaccgcacccagcacggaggaagagggagaaagacaagagcaaaaaagccccgaccccgagcccacccaaaaacagccccagagccgagcaagcaggacgaaccaggcagccagggccgagacaggagccaaagaaacccaccagcgagcaccgaggggggggggggggagggaaggccagcccggcacacagaaacaacaaaagcggaacccaaccaaagccagcacagagaggagcggaagcaggagcaggaagcagcccagcacacaggaaccaagagcaaccgagcaacaaccgccaaagaaaacaaaaaacccaagcaggaccaaccccaaccccaagccccccaaagggcgagaaccacgcccccaggccacacccacccaagccccccccacccacacgacccccggcaccccagacccccccccagccacacaaaaccaagagccgccaagaaaagcccaccagaacagaccagcaccggacaccaggagcaaagcaacgggcccggccaacccccagccgacacagaaaaacagccacaaccgaagcaacaaaccgggagaaacagagcgaggcgagaccggccgagaacgcgccccccgaagcccaaacagaagcagagcacacaaaacacaaggaagcacagcgcaacagagggaccccggcagggagagaggcaaacgcaaggcgccaaagccacgaaacaggggaaacaaaacgaacagccaaagcacaaaaagagcggacaaacaacaacgagcaggacccagcagggacacgagaaaacacaaaacaagcgccaagcgcacagaaagcacgacgaaagagaaaacaggacccccccaaaaaaaagaaaaccacacaagaccacagacgacccaagaagcgaaaacaggaaagaccaccccccacaacaaaagaccagcgaacagaaagagaaaaaaaaaaacagaacagggaaaagcaaccaaaaagaaagaagaagaccggaaaaaaaagggccgaaaaaaacgaagcaaaacacacacacaaaaagccaaaccccggaaagagcacgaaaaaaaaccagaacagaaacaaaaaaaacacggagcggggcacacccacagccgaacgaggcggaggcacaggacagaaaccaaggcaccaggcaagaaaggccccagcagccagacagcgaaaccaaagagaccaccgcccgccccaggcaggaaaaagaggaccaccacaccgccaaaaaaaagaaagagagccgcaacgggaggaaaaccggggaaaacacaaaaaagacacaagagaccccacccacaaagaagaaaacagagccccccaaggaccccacagggacaagagcacagacagggaccaaaaacaaggaacaagaagaccagccaacaggaaaccaggaaaagaccaaggcaaaggacaccgccgggagcccgaacccggccaggacagagaaaacaagggcccagaaaggaaccacccagacagaacaagaccaccacgcgcagaaccagaaggaagagccaacagacccaacaacacacaaggaacggcacaccaacccagcagcagaggcgggcacccgagcccaggccaaaaagaaaaacaaaaaggaaaaaacaaaaaacaaaaaaacagaacggggccaggcagccagggaacccacagggacggggacacgaaacccagaggccaagagacggacgggggaggacagcccagccgggcacacaacagccgaaaccagagaaacccacagccaaggaaggcagcacacaccgaaccagcacgggaagagaggcaggaagaggagcaggccaccccggcacaagcaaggaagccaaaacgcaaaaaagacacccggaacccaccacacgggagccccgaccaaaaagcagccccgcaaaaaaaaaaaaaaaaaaaaaaaaaaaagggaagccaagacccaaagccaagcaacaggacaggaagcgagcaggaggaagaagcaagcaaacgagcaagagagaccggccaaaaaaagaaaaaaaaaagaaaaaccggcagaaaacaaagaggcgaaaaaacaccacccggacggacccggggccccggcaggaaaaagccagcccaccaccaccaaagaaaacgaaggggggcccaagaccaagagaaaaaaacagcaacaccccaaaaggcccaggcaaacaaaaccgaagcaaacaagaaaggcacccccaagaacacccggcccgacacgacaaacgggcaaaccaaggccacgccaccgccgaccgacaccaagagaagccccccgcccccacacagacgaaagaaagggcacggaaacaccaaaacacgaacggggggggcgcacagcaagcacaccaaagaccacggcagccgaggaagaaaggaccaccacgcagggaacagagaagggggaacaaaccaacgccgagcaagccgcaaagagaaaaagaacacagggcggggaggccggggcaaagccccagaccaaaaagacacaaaagccaggaccacagcacagaccccaccagcacaaacagaaaaacccagacgcgcggggacgggcggggggggggggggggggcaaacacaaccgggcagaaagcgagccaacagacacaaccccagcagcaccggagaacaacgcagagggaaccgaaacgaccacggggaacccagggaagaagcccccagcgaaacaccccgggcaacggcagaagaagccagcccagccaaaaccaacagggggcgggccagcagagaccaccaagggcgcaaggaagcaagagggcggggcccacacacaccacgcaccgcagggccaggcaaccggaaaggacagaacagccaggacccgggaccaacgccgcgcacagccggcagacagagaggaaagaggaaggggcgacccagcagagaagaacgcacgaaccccagggggggggagacagcgcgcgagcccagacggccccaaggcacgacaacgagacgaacccgaagccggccaccggcgagacagggccggagcccggcgccagaaccaccgagaacaggcagccggaaccagaaaccaccgcccgcccccaaggcgggaaaaggcggccaccacgcccggggcaccggcacacgagggccaaggggcagacggccaaacccagcccaaaccgggcgggagggagcaggggcgaaccaggacaaaaaacaggaaaggccaccacgagccacaccccggcggaaagaccgcaaggcgaccagcaacaaaagcgccaagaacccccccccagacacaaagaaccggaacccgcccccgaaacaaaaagaaaaaaacggacacacacaaagacaagccagagcgcccgagaaacaaaaagacgggggcgacccggaaggagcgccacgcgaaagggcacaacaccgaaccgggaccaaccccgaacgagaccaggcaggcccaaaccagaccaccgccgcgcccggggaaaggggcacccccacgcggccaagaaagggcaaaaaacaggcggcgggcagggggcgcgccaacccagcacgggaggcagaggcaggggacgagcgaggccagccggcacagaggagccaggacagccagggcacacagaggccaaaaaaacagcaaaacaaaacaaaacaaaacagaacggccagaacgggaagaagaagaggaaggggaaggaaaaaaaaggaaaaagaacccccaagagcacaagccccccccagccccccaaaacacaacgcaagagcgccccaaaggaggggggaggggcacggcaaaaccccaaaccaagagagccagaccgcagaacaaacccgaaccgaaccaaaggaaacaaaaaacaaaaacaaaaacaacaaaaacaacaacaacaacaaaagcaagaaaagaaaggcaaagaggaagcgcaaaaaaaacagcaccccaagaaaacaaaaagaacggcaaaggcccgccaccacccccaacacagggggcggagaggaaagccccccagaagacgccaaaagcacaggcaccagagccagccaaggaaaaaaaacacggaaaagaaaaaaagaacaaagcagacagaggggcgacagcgcagaccggcacacgaaagggccgggaaccaacgcagggcacccccgcaacccccaagccggcgagggaaacaccaagaccacacaacagccccaaccaagcacggggcggaagcgcacgaagccaggaagcaagagaacggagacccagaaaagcacagccacggacaaacacgagcccgcccgacccaggacaaaggacgaaaagcaccgcgagcaccccagagccccacagcccaaaagaaggaaagggacagcccacacaggcaagagaggggaaagacacagaaccagacccagacagcagaacacccgggaggagccacgaacaaggccccaaggagaaagaaccacagagaagaaccccagcagcaaggcgggaagaaaacacacccccaaacaaaggaacgccacgcaaggacacagccaaagcacaacgggaccccacaggccagagaagaagcccgcgccgcaaaggagaagagcacaggcccaaacccaccaacagcgccacaaccggcgaaccagcaacgggacccaaccccggccacggcagcacaacagcacacaacacacacagaaaaccacacccaaaaaaaagaaaagcagaggggcagagggcaaccagcagggagacaacagaggaccggaacagccggcagagaacaagccgcaaggcagggcacacaaagaaacccgaccgaaaagccaaaccaaccaaagaagaagaagaaaagcagaagaagaaaacagaagaagaagaagaagaagaagaagaagaagaagaagaaaaacagaaaggaaccacacgcaaaagaagcagaaagaccaggaacaggcaccagcacaagaaagccagggcagaagcacaggaaaacccaaacaaaaaaaacaaaacaacaacagaaacaggaccggaaccggagcccggcgccggaaccacgagaccaggcggccgaacagaaaccaccgcccgcccccaaggcgggaaaaggcggcacaccacgcccagcaacaagagcaaagaagagacacggcgccagacacaccagaggagggcacagaccaacagaggggagccacccgggggcgggaagaaccagaaccggaagagcaggggccaaccgcaagccaccccagccccaaaaaagcccacgagaaaggaagcaaaggaaaaccaagagcaacacacaaaaaagacaaacaagccgggccaacgggcgcaacccaggcgggaggcagaggcaacgagcaaaacaaaaaaagccaaggccgagcgccccacaaaacgagaggaaacagaccccagagcggaaacaaagagggaacaccagggcgggaagaacccagccgaagagcaaccagggccaaccacgagccaccccagccacagaagaaagaaagagagaaagaaagaaagaaagaaagaaagaaagaaagaaagaaagaaagaaaggaaggaagaaaggaagaaagaaaggaagaaagaaaggaagaaagaaagaaagaaagaaagaaaggaagaaagaagaaaaaggggggggcgacacagcaaaaaaaggagagaccaagcgaaacagccagggaaacgagacaagaggaccagccaggcccaacaagacaccaaagagaaaacaaaaacaaacaagaaaaaccacaggcagcggggcagacccaacccagcagaggcagaggaccggagcccaggccagccgaacacaaagcagaagggcaggcagggaaacccgccaacaaaacaaaacaacaaacaacccccccaaaaaaacacaaacaaacaaaaacaggccagggagacaaccagcggaaagacagggccaggcagagaccggcaacccaggacaaaaaggaaaaaaaaaccaccccaaaaggcgacaacgaggcggggggcaaacacaaaaaaaacaaaaaagaacgaagggacaacaggaaagagagaaaaaagaccaacaaagacgaaaagacacgcgacaacaggaagcaagggagagagagcagaaaccaagaaaacgacagaaaaagaaaaaacaccagagacgggagaagaagaaacaggggaacacggaaaaagaacgggccgggacaggagaacaggcagcacaacagcaccaaagcaggcagcgaaagcacaaaagggaacgaagacccccacccgccaccaaaaccgccggaaaaaccgaaacaaagagcgacaaaaaagaaacaaaacaggacaacaaccaaaagagccgcagaaacagcagcgaaaaagccagcggaccgggcagcaagcgggacagcacggcaagaaccaggaaaaggccagagaaaaaggaccagcgccaaaaggccaaagacaagaaacacaagaaagcggcgcgcgcaacacacacacacacacacacacacacacacacacacacacacacacacacagcaccccccgccaaagcaaagacaagacaccggacaaacccagcagaagcagagagcagggcagagcacaacccgggcgaccagaaaggaagggccacaccaaagcagacagaagagcccacccggcacgcagcccaccccgacacacggcacaacacccaagccacgaacaggagggggggaaagccggaagagacgggccgcaaaacggccccacggacacaacccgcaagaccagacaaagagcgaagagcgagaccagacaacgcagacggagacacagaaggaaagaaaacacaaaaaaaaaagcgcggcagggcagccaacccaacccccagaggcagagggacggaaaaggccagcagcgaaggagcccaggccagccaggcagcacaagg

SEQ ID NO: 757 - RNA, 10141 nt, Mus musculus
  misc_feature (5296)..(6850): n is a, c, g, or u
  misc_feature (8065)..(8164): n is a, c, g, or u
ggagcggccaggggggagaagaagggacggaggggcaaagaaagagcgagaggagaagaaaagaggaaggagggagaggagcgaaggacgagggaaacagggcggccaagcaggggaaacccacaggcaaacagggccaccacgagagccagcaaggaggacccccagaaggacgcggcaggggccggcaccggaggggacggccggaaaacccacccgggcaggcccagcaaacaagggaaggcacccaccacccgcaccgcccaagggaccaaaggcccagcgcgggaggagagaagggacggggggggggagcccacaaaacagcaccacccccagaaacccggaggacagggccggcccggaagggagacagagcacaggccagagagacccgagaccaaaggaaaagaggagcaaacaacaaagcacagccaaccacagccggaccagaaccgagcaggcccgccgcgggagggggggggggggggggggggggacgggaacccccacccgcagcccagcacaccaaggcaagcagggcgagggaagaccaggcaaagggagccaccagcaagagcaaccagccgacgagcccacgcgagcacggggaccaacggcagagggagaccagggcacagggaggggggagaacagaacaggaccagaagcaggaagccacacgggcacagggaagcgcagaaccccccaggacggcaccggccccaagccacaccacccggccaggggaagaaggaagcagaaaaagaggcagggaggggggaggaaacaggaaaagcacagccggcagaaacaagcacgggagcccccgacaccgggcgcagggagaaaaccagcaccagacggaaacggggacaagcagaagaaggcaggcagccgaagaccccccggacccccaagccccacacagggaccgccgaacccccaccaccgggaccagcaggcacaacaggacgagggacaaggagccacaccacccacccacaccccacaccccgcaccccccgcgaggaggcaaggcccacacaccacccacgagaacagaaacaacccgccggcaaccaaagcgggaacagggggccaccaggccagccaggcgggacccagccaccagccgccccccccacccagcccccaccaccacgaggcagaccccagagcagacggcaacccgcccaaagaccaccaaggagcgaaacaccgcccggaggccccggcaagacggaggggaccaggaaacccgcccgcccaggccccagaacaccccggcagaagcacagaaagggcaaggcaggagggccagcgaaacgcaacacaagacagcgggggcccacaacagcgcacaacaccagcgcggggacagggcagaaggcaacaacgaggcgagcagcagacgcccaaaccagaaggggcccaggaccagagggcccaccccccagaggccaagagacgaaacacacccaggcagcacgggcagcgccggaacgggcagcagaaaaacagaaggaggccgggaaaggcggccccaggcgccaagcacggacccaggggcacagaggaccccaaagccgaaggcgcccagggagaggggagaacgacccagccagggagagaagagagaaagaacaaccacggagaacacagagccgcagcaagagccgcccaccagggagccgaacacagagggaccggacgcacaggccaacggaaccgcgacggaagccacaaacccaggggaaaagccaccagagccccgaggccgaggacccaaagcccgcaaaccaaagccaccgcccagagcccaacacccaggaccaggcggccacccaagcaagggagcccaaacaaacgccgggccaccaggcaaccccgcgaagagccaggcaggaacacagaaggaaaccagcgccccaggggaaccagaagcccaaccacaagaaagagagaacagggaacgagaccggaccacaaaaccaagacacagcgaagacagcagaaaaacaccaaaagaaggaagagggggcagaagccaaagggacaagagccacaccacacagcagggagcacagcagcaggcaggcagaggcggggcagcgagcgagagccacacaaaacccaagcaagagcagagaggagaaagggaagcaagggggcagagccacacccaagaccacccaagaagaacaccccaacacaaacagcgcaccacggggagcaaagaccagagccagcaggagagccaaacagaaaaaaacacaaagaacccccccggaaccccacaaacccccaccacccccccccccccgcccagaggggcccccacccaccaccacccgcccacgccagcacccccagcggggacaagcccccaggaaaaggggccccccccagagaaaaggcaccgcccaagacggagccaggcccccagaaccgggaggaggccgggagccggggggcagaggaagcccagggagcaacccccccccccagccccccagaacccagggcccgagccagcgaggaggcggagacgcacgacaaggcggagaacccagggaagagccaaccaggcccgacagcaagaccaggcacagcaaaggaggggggggcagagagaggaacccaggcaagacaacgaggcccccagccgccagcccgcccagacaggaacacgggaaaaaggagggggggcccaccccaacagggccagcaacacggaggggcgacagggaccccgggggagcaagcaccccagggcgggagcccaccccggagcaggaccagcccaacccacgcacagccacaaaagaccgaacccccgcccccaaagaccgacgcccccccccccccccccagccccccccacccggaggcccgcagaggacgaagcaacacagggcccacaagccgagagccaaacaccaccaaacacacagagcacgagggggccgaggccaggaaaaagacggagacagaaaaaaaacacagcaacgggagagagggccacgggggccgagacccaggaagcaacgggcgaggggcacaaaggagacaaaggcaaaaaaccacagcacggaccaggggagggcccggaaacacaacagggcaaggagccccaaaaaggagacaggcagggaacaccaggggcgggaaaaacagaccgcaacagcaacaaggccccaagcccggccacccggccccgaagacacgggacacagcagccaggagggaccacgaaggacaccggggcccccccaaacaaccgaccccagcgcaccaaagacgcaaagaggacacaacacccacagacagcaaaccaagagcgaaaaccgcaaaacaaaccaaacccaaagcagacagccccccaggggaggggagggcagagcccaaaagaaagacaccaaaaaaaaaacacaaagacacaggacacccgaaaccaaaaccaggcggcaacaaccaggcaccacgacccaggcgcccagacccacgcgcaaaaagcaaccgcaacaaagcaaaagccacacgcccaaagcaggggcaggcgcacagcaaaccccacccaggaccaagaccggagggggggaaagcggccagggagggcggcaaggaggggccgggagcaagaggccggggaggaaggacacggggcggggagagacccccagcgccagggacagccccggcccagagaagaaagagcccaccccccgcaccagccgccggagcgccaacccaccgagaaaggacgagcgcgaaccgaaaccaaccccaaaaaggacagagaggccggcagagcgcacagcagcaaaacgaaacaagacaccaggccaacaaaacacaggaccaaggggcgcaccccagaggggccccccagggagggagcaagagcaacagcagaaggaggagagcacacccaccaaaggccacaagaggacagagacagggcgcaaacggcaaaccagggagcccaggaccggccccgagggacaaacccaacaaagccacagacgaacaacacaccgacaggaccgagcacacaccacagagagaggcagacgacacgagcaggacagccaaccagaccaaacacacgggcaagcccagagaacggggcacgagacaaaagcggcccaaagcagaggggaagcgagacacgcagccacaaccagagaaccgagcgcccgggccccaaaaaggagggcagggcgggccacagacagcaaggcagaggcaacagcaaaccagccccacagaccccacaggcccgcagcacaggacacagaagaagcacggcaaaacggcaaaacaaaaaaaaaaaaccgagcacggcaagccgcggcacggccagcgcaagcacgagagaccgcaacagaacgggcaggaagaggaaaaagcaccaaaaaggagacagggcaaacccaagacagccacacacacacaaaggcaaaagaagcaggaagccaagcacccaaccacgcccaagcaaagcagccaaaaaccaaggggcacagacacgaagcaaaccaacaccaagggaaaaggacaccacaaccccaaagagcgggcagagacaggcccccaccaagcgcggagggcacaggagacggaacccagccaccaaggagaaaccaagccaggggaggaccaggaaagcagaaagggggaggagggagaaaacaggcggcaggggcagagaaggaagggaagaggaagcggcgaagggaacaggaaaggggccccaaaccgcacacgaccacagcaaaggggggaaggagagaggagagaggaaaaaggggaacaccccgcaaagcaaaagagcaagaccaaaaaaagaaacagccaggccaacaaaacagggcacaaaagcacagcccacaggcgccgccccgcagcgcaaaaaggagagccaggaacggcccggcgaggaaagcgggaaaccaggggccaaagggcgggaaaagaaccaaaggaagggaagagagaggggccaagcaggccagacaggcagagaccacccgagaaggaagggagggcagcggggaaaaccgagacgagcccagcagggggaagggccaggggagcagggagagcacgagccacagcggcagccccccagcccagcgcagccacccaggacccgaacaccaggcccaggacgaccaggcaggagccccacccaggcagcaggcaccccaggaacagggcgggcaaaaccagaggaaagcaccaaagacgaaagaaaacccgggacaaggcacgagcagccaccgaccgnnnnnnnnnnnnnnnnnnnnnnnnnnnnnnnnnnnnnnnnnnnnnnnnnnnnnnnnnnnnnnnnnnnnnnnnnnnnnnnnnnnnnnnnnnnnnnnnnnnnnnnnnnnnnnnnnnnnnnnnnnnnnnnnnnnnnnnnnnnnnnnnnnnnnnnnnnnnnnnnnnnnnnnnnnnnnnnnnnnnnnnnnnnnnnnnnnnnnnnnnnnnnnnnnnnnnnnnnnnnnnnnnnnnnnnnnnnnnnnnnnnnnnnnnnnnnnnnnnnnnnnnnnnnnnnnnnnnnnnnnnnnnnnnnnnnnnnnnnnnnnnnnnnnnnnnnnnnnnnnnnnnnnnnnnnnnnnnnnnnnnnnnnnnnnnnnnnnnnnnnnnnnnnnnnnnnnnnnnnnnnnnnnnnnnnnnnnnnnnnnnnnnnnnnnnnnnnnnnnnnnnnnnnnnnnnnnnnnnnnnnnnnnnnnnnnnnnnnnnnnnnnnnnnnnnnnnnnnnnnnnnnnnnnnnnnnnnnnnnnnnnnnnnnnnnnnnnnnnnnnnnnnnnnnnnnnnnnnnnnnnnnnnnnnnnnnnnnnnnnnnnnnnnnnnnnnnnnnnnnnnnnnnnnnnnnnnnnnnnnnnnnnnnnnnnnnnnnnnnnnnnnnnnnnnnnnnnnnnnnnnnnnnnnnnnnnnnnnnnnnnnnnnnnnnnnnnnnnnnnnnnnnnnnnnnnnnnnnnnnnnnnnnnnnnnnnnnnnnnnnnnnnnnnnnnnnnnnnnnnnnnnnnnnnnnnnnnnnnnnnnnnnnnnnnnnnnnnnnnnnnnnnnnnnnnnnnnnnnnnnnnnnnnnnnnnnnnnnnnnnnnnnnnnnnnnnnnnnnnnnnnnnnnnnnnnnnnnnnnnnnnnnnnnnnnnnnnnnnnnnnnnnnnnnnnnnnnnnnnnnnnnnnnnnnnnnnnnnnnnnnnnnnnnnnnnnnnnnnnnnnnnnnnnnnnnnnnnnnnnnnnnnnnnnnnnnnnnnnnnnnnnnnnnnnnnnnnnnnnnnnnnnnnnnnnnnnnnnnnnnnnnnnnnnnnnnnnnnnnnnnnnnnnnnnnnnnnnnnnnnnnnnnnnnnnnnnnnnnnnnnnnnnnnnnnnnnnnnnnnnnnnnnnnnnnnnnnnnnnnnnnnnnnnnnnnnnnnnnnnnnnnnnnnnnnnnnnnnnnnnnnnnnnnnnnnnnnnnnnnnnnnnnnnnnnnnnnnnnnnnnnnnnnnnnnnnnnnnnnnnnnnnnnnnnnnnnnnnnnnnnnnnnnnnnnnnnnnnnnnnnnnnnnnnnnnnnnnnnnnnnnnnnnnnnnnnnnnnnnnnnnnnnnnnnnnnnnnnnnnnnnnnnnnnnnnnnnnnnnnnnnnnnnnnnnnnnnnnnnnnnnnnnnnnnnnnnnnnnnnnnnnnnnnnnnnnnnnnnnnnnnnnnnnnnnnnnnnnnnnnnnnnnnnnnnnnnnnnnnnnnnnnnnnnnnnnnnnnnnnnnnnnnnnnnnnnnnnnnnnnnnnnnnnnnnnnnnnnnnnnnnnnnnnnnnnnnnnnnnnnnnnnnnnnnnnnnnnnnnnnnnnnnnnnnnnnnncacccagagagcacgccaagaaaaaggacagagaagggggcccaacccagccgacgaagagaaaggccagacggagaaaccagcacaccgaagcgacaggaggagccggagaaagggcacaaaacacaacacgcaaaaaggaagaccccccaagaccccgacccggcgaagccggcaaaccaagacaggaaaaggagggagaaaggggcagccgcagcccgaaggggagcccagcccccaacgagggcacgggcgagagcaacagaggagggccgaaccgacccaaaacacaaaaggggggacgcaaagccgcacaacaagagacagggcgcgaggaaaaggaacagaggacgaaaaaccacccgcacccggaaaaaaccacggcaggaggagagcaaggcggacggagcgagaaagaggagcacgaacaaagagaaaggcgaagccacggggccgggaggacagagaaagggccaaaaagaggggagagacccaccaggaaaagggcagaacggaaagaccgaggcgaagaaccgacaaaccgcggccgggaggcgggagacaaaaacgccacagggaagggacgagaggcaacgaccgacaacggaccggacgccagaaagccacgccaggccagggagaagccgagaaggacgagggggaccaggacggagcccccacgagaaaggagcccggccccaggagcagcaagggacaggaccaaagaaccaaccccgggaacgaaagccgccacgggacaccccgaggaaccgccacaccccgaggaagccccagagcagagggcaagcgcagaggccccccgccggaggcaccagagcagagccccagaaagccaggcccaaagggggacggggccacaaaaccaaaaagcaaccaccccgaccaaggacagagaagagggcagccacggaagggcccaaaggagaagacagcaggccagggggcgaaggacacagaaacaacaaagaccggaggccggggaccaaaaggcagggagaaggcccggagggcgagaagaaggaaccgaggaaaaagcgagaacgcagaccagcaaaccgagcacggcccgagcgccacgacgccagagaaaggggggaagccccacaagggagggcaagggcgagcacaaaggcaagaagggcgccgcaggagcagaacagaagagagcccggaggaaccgagagagaaggcccnnnnnnnnnnnnnnnnnnnnnnnnnnnnnnnnnnnnnnnnnnnnnnnnnnnnnnnnnnnnnnnnnnnnnnnnnnnnnnnnnnnnnnnnnnnnnnnnnnnngacagacaccaccaagcgacgaccccaccgggcaggccccggcaagcacaagagacagcacacgggcccaaaaaacgcaggagcaagggcagcgggagcgaaggggggacccggaaggcagccacaggccacccacgcagcccaaacgccgaacccccagggggcccaacaagaaggggcaagggcacaccagccaccgagcaggagcaaagacaacgggaccaggggggcaaaccacacaggagacaagggagccggaaggacccaccaggagagcccccaggccaccggcaggaacaaaacacaaagcgagagacccaggagagaccacacgaccacccggaggggcacgggcccagccggcaaaaaaaggcgcagaacaggggagcaggcccaccagggggcaccggaaagcccaggagaggagcggaccccggagacagccaaccgaggaaccgccagacgaccagaaggggacaagccgcaacccaccaacaagggaaggaggcccccacaccacgccagcaccgcgcaccgaggacagccacgacggggaggggaaccagggggagaacccgagaaaggaggaacacagggccgccacagacccagggagaacgcaacgagccccaaaggggagacgaagccacccgggccggaacaaagagccgaccaaaggaagccaacaccaagcaaccaaaagcccccaccggacccacccccacccccgaccacccaccccccggcccggcccccgacggggcaaaaaggcaagccaagggcgcccccaggaggccgacaggccacgaaaagcagcagagcaagagcccggcgacggagccaaaggccaccaaggggcagacccagcccgcacccagcccccagggagcccagaccaccaagcgacgaagcaccaccggcgcgggcccggcaagccacaagagacagcacacgcacccaaaaaacgcaggagcaagggcagcaggagcgaaggggggacccggcaggcagccacaggccacccaccagcccaaacccgccgaacccccagggggcccaaacaaggaggggcaaggccacaccagccacccgagcaggagcaaaaacaacgggaccaggggggcaaaccacacaggaaacaagggagcggaagggaagaaaccccaacaaaacaaaagaagacagccacaagaacagaagccaccaacaacaaaaaacaggaagcaacaaacccaaaccaaacaaagaccaacccccaaaaaaagacaagacaacagacgcacacaaacaggaccaacagcgcacgggaaacccagagaaaaagaagacacacccagaagaaaggcagaaaacaaccaagcaaacgagaagaaaaaagcggagagccacaaacaacaaaacgacccaacccaaagcacaaaaaagacaaggaggggcaccaccacaaagaaaaccccaagaggaacagacgaaacaggccaaaacaagggcagccacacaaaaggaacagaaagccaaagcacacagcacccacacaaaaaggagagaccaacaccccaccaccaaggacagacaggaaacagaaacaaacagggacacagagaaacaacagaaggagaaacaaaggacgacagaacacagaacaaccaaaacaaaaggaaacccccagcacccaggacccccaaaacgacacaaaggcacaaaacaaacccaacaaacaaaaaagaaagcccagcaccacagacaccaggacaaagcgaccaaaaaaacaaagcgaaccgccacaaaaaacggcaagagagcacaccagaaaaaggaaagaacaagcgcaaccgccacacaaacagaaacaccgggggggggggagggacaaagaaacacccacaagcacacgaaggggaaaacagaacacaaacaaaacgagggacagcggccggccacaaaccaaaacacacacacacacacacacacacacac

SEQ ID NO: 758 - RNA, 19840 nt, Mus musculus
cagccagagagcggccagcgggggcggggggggagcccgccgcgagccggccacacccgcccggccaccacaccacaccacgggaggacaccagcggcagagacacaagccacccacagaaagcagcgggaagcaccccgcggaggggcccgggagcgcagacaggagcaaagcgagcagcgcaagccaggacccgggggccgggccgccccgcgcgccccaccacggcagaaacccccgccaaaagagaggagagccgcacgaaggggccgagggaggcgacacggggaaagaagagaccgggagacaagagacgggggaaaaggccgccaagcgacacgaagcagccccggacccaccggaggaggggaagaggcggaagcggaccccacacagacacacagagacagaaagagcggagagaggccggagacaaagcgccccaccagaggagcaggggaccagcaccgcccaggccacaaccaccgaagagcccagaggggagcccggcccgagaccccgaacacagcaggaccacacaaccacaagaaaaaaagacaaaaaaaggaagaaggagaccaaccgcgaggcccaaacgggagcgaacaaaaacacacacagggggccagcccgaggaaacggaaggagcagaacgcccaaacccagggaggagacccaggggcacaggacacgacacggacgggacgagcgaccggggacggggagccgggggcaaaagggggcaaaccccagacagaacacacgcccaacagaagcgcaccccggaaggggccaggcgaaggccaggacagcagcgacacagcaacaccagaagggggcccaaaggaggcgccccgggaaaggggcagaaaagaaagcagggaagccacgggcgggacggagcccagggcggcagggccccggggcagcccagaggcaggccacagggaaacaaaccgaaggggaaaaaaaggaaggaccagcaggaaggaaaaaaaacccgggcaggagcagcgcaggccgaccgagcagcgcgagcacccagcaggcaggaggaggaggaaaaggaggggggggaacaggagcagggagggggggggcagccggaggggaaacgaacagggggagagaaaggagggaaaaacgaggggggggacgggggcggcagggcaggagaggaggcgggagggggaggggggaggagggcagggaagaggacagggacagggggagaaaggaggggaaggaaggagaaaagagggagcaggagggaaagagggaagacaggggggagggaaaaaggaggaggggcagggaggggcaggggggggaggaggagggaagggaagggggcgggaggggaaagggggggagagagggagagggagagggaggagggaagagagagagagggagcagaagggcgggaagggaggaggagcacgcgaaccgggggggaaaggggaagggaaagggggggggggggggggggggggggaaggaggggagaaagggggaagagagccaagcaggaagcaaaagggcaaggcgcaagcaaagagggcgcagaaggggcggggagacgcacacgaggacaagaggaaaagagaggggacagaggcccggacgagagcccccaggggccccacccacagcccgcccgaggggccaagagcggcagcacaaaggacagaaaaaaccaacgagagggaagggcggaagacacagcggcgcagggaggccagaaggggccgggccgcccaccgaccagacgggcccaccaaaggccgggcggcgccagagagacccagggacagacgcggccccccaggccagacacaaggggacgccaccgccggggacagggaggaaggaaccaggccagcggaccaagcacaccaccaaagggcaccccccagccggggggacgaggggacaggaagcaaagaggaagaggcagggaccagaaggcccaaagacaacccaacaccgaagaagcacaacggggacacacagaacgaaaggagcaaaagacagaccagaaggcccaccaccgaccggaggcgcggagagacagggggcacgagcaggcaagggcaagggcaggccgcggcacgccccgccaccagcaccaaagccagggcaggagacgagcgggaagcaggccagccgggcaaggcagggggagccagccccaagaaaagcccggcaccccgggccacgcaggccacaggacggaaagaaaggcaaccaccaaacaacaggccacggcagccacgcgacggcccaggaaggccagccacaggggcacaacaggggggcaggagcaggaggggggcacacacaccaccgcagcaagcagaggcagaggaggcgggccaaccgccccgacgccacccaagcccaacagggaaaccccacagacagagcccagaggccagggacaaagcaaggagagaaaagagcccccccgggggaggacaccgaagcaggaagaagacgagcccacccgccccaccacaagccgagggaggcaaggcgcccagaacgcagagcccacacacagacccgaaggcaccacgagacccccggggcgccaacagagcggacaccccccccccccacacacacacacacacacacacccgagcacagcgaacaacgccccacacaaagccagacagaacgggcagcccaccaggaccagcccaggggggggaacccgagggcggcccggccacccccgccggcacaccgcgcagcaccgagaacagacagagccagagagcaacgagccagggaggagggaacggcaaaccacgaggcacaacagagagcagcccccccgcccccggccccgaggcgaaggacgaggccccgcacggaaccagagcagagacggggccgaccgaaccggcgcgcccaggcaccaacgccccggccggacccagagcccggcccacccccggccgcccggagcagagaacccaccccaccgcgagccagggggggggcaagaagaagcccccgccaaggcagccagcagcacacagcacgccacacccgcaggcaccacccaaacccagagcacccgcgaacgcaccaccgcacaaccccgcgagagacacgccccccgccaagcccggaggaaaccccccccgccagccggagggggaaccgccccccgccacgccgcaagagaacgcaccccgcgcaccccaagagaacgcaccccacgacccgcgcagggaccccccccccgccacgcccgcagggaacgcccccggccagccgacagggaaccgcccccgccagcccgagaggaaacagccccccgccacgccgcaagagaacgcacccccacacccggagggacccggccccgccacgccgcggggacccgcccccgccagccagagaggaggaccaagcaagagccccgcaaagggcacgccggcccgccacccccgagggacacccgaagacagggcagggcccgcaaaccaccgggcgccaaagggcccccacagccaccaaggacacacgagccggcccgcggacaccagcggacccgcaccacacgacccaacagcccagacgaaccgcagagcgaccccacgcccccaaaacgcaacaccccggcggacagggccgagagcccggcgccggaacacgagaccaggcggcccgaaccagaaaccaccgcccgcccccgaggcgggaaaaggcggcgccacacacccggccacacgacacggaggcgacgcaggcaggggggcacgcacgcagaggacagggaggaggcagcgaaccccaaagcccagaaaggccccaccaaaccaaacgagccaagaagcaggcaccccccccagggcgggaagacacacaacaccacggccggcacaagggccaaggacaaacccaggccgccacacgcgagcagacccgaacaaccgacagagccccgccaaggccgcccgggaagcacacaacgccgaccaacacaccacgaacggggacccccccaccaccgggcaaggagaccgcaacgggcacaggaacaaagagacgagcgacacggccccaggccgccaggaggaagaacacagaaagagcaggggagacgggaccgagcgcgcaggggggaggaagcaccagcagaacaacaaagacacagagaaaggggggagggaaaggggggaacaggcccggggggggggcaggggaaaagaaagagccacaccccggaacacggagacccggcggccagaccacagacgcgcccgcccgaggccgggaaaaggagcccaccagcggcgacagaggcccaccagcggcagcagggcccgcgcccccgccgcccggaccagaaacgccaaaagccacaggacgccgggcacaaaccaacaaagcgggcccacaacagaagcacagacaaacggcaaagagacgcgggagaaccgcacaaagaccgccgcggaacggccgcgcaaggaagccagaaggacacagacaaccccagcccccacccgaggcagcgcccggaccggggccacgaggcagacagcgagcagaaaaccccgggacaccgcccaaccccacaccagagcggggacagacaagaccaccagcccaggggcgggccaaccaggcccaggacgagcacagcccagccccaccccacccaacccagggggaccgcaggccccccaagcagcaaccacccagccccccccccaccaggcgccaccagcccaacccccaaaagaacacagaacgcccgggaaagaaagccaggacacagcagcaggcaaccagcaagacaggagacaaccgggagaaaaccaggaggaacagaaagacccgccgcgcaaggaaaaaaacaaaacaaaacacaacacaaaagagagagagacacagcccaaaaggaccaaagggcgcaccaccagaaaccccacccggcagcgagccagggggccccggcgggccgagagcacacgaaggacgaaccccaacaacaccgcgcagagcgcaaggaaagaagcagacgcaccgaccggacagggacaggacgagccgaagccagcaggggcgggaagcccgagaaagcaaacaggacgggaaggcaccagcacaaagagaggaacggacggaccccgaaacccaagaaaagcaggccggggcaaccgccaccagacaagggggggcagggcagggcacgggagccacaaaccagcgagccgaacagacacaaaaaagagggagaggacagagaggaagcacgagaccagccggcggacacacgggcaacaacagaggcaagaaagggagaaaggggggaggggggaagaaagggaaggaggaggagaaaagaaaaagaacccaaacacacgccaggaagaggaggagaccgccacaaaacaggccggcacaggcgcacgaaagccaaaccggcccacgacagcaaaacacaccaccagcacagccacaccacaacgacaaaaagcagaagccaaccaagggcagaaaacagcgaagcgaacccccacagggacccaggcaagcaacgcgggcccgcgcccacaaaaccgggaggacaaagacaacagaagcccggacccaaggcaccccaaaggaagaagggggggggccaaagaagggggggggccaaccaaagccaaagggcagggaagagaccgcccaagcacgcagaacaaaccgaaccaccacacacgagagagggacggaaaaaaacacccaagcgcaaaagaagagagagggggcaaacaggagacaagccgcacaccacacaggacgccacaccaaccccggcgccggagagagagagggcacaaggaacacgcgccgggaaggcgcccaacccccccccggcaccccgaggcagggggccagagcgcccgacagggcaggcaaacggaagaggagacagggaagggcagagagcaacccagcgcgagacgaaccgcacccgagggggggggcggggcacgaaaacaaaagaagaaccgaggcagcccccgcgggcgccccaacagccccaggcacaccccccgcacccgccaagccacccaacaggccggagagcacgcccgccagagccccacggcaccggcccgagggccagcacagcacccgccaacagagacgggcaaggcacagacacacgccaacccccacccccaccccccagcagcacagcagagaccagcagaaaagcccagccccaggacagaccaagcagaggcgggaggaaacccaccggcaggggagaacagggcacaccaaagcaaacacagcaggacccggcacagggagaacaggaaccggccaagagaaagaagaaaggcccccccccccccccccccccccgcccgcggaaggagcggaacaagaccacaagaaccccccaggacagaccagaccaccccaggaagccaaggcaggaccccagaaaaacgaacccaacaggcaggagaaggaacaacagagcagcgggcgggaagggcaaaaccccggagaaagaggcccaccacacccacagcaccgagcccccgggagcgcacgggggggcagaaaaagagggaaagggccagggagaacaccaggggagcgcccagaacaccaggccgaagcaccacgcccccaagcggacggggggaaaaccaggcccagggccgaaccgagaaaagcaagaaaacaagggagggggcagaagccagagaccgaagccggagcgggacgcagcgcacgaccaacgccacacaccacgagccacgcggaaacacagaaagcaccagaaagaagagggacagggcggagagaggccaaggaagaacagacgccccagaggccgagcaaacccagcaaccacgggggccacaaccacgcaaagaagagccccgaggcgaagagagagcaggaccacaaaaaaaaaacaaaaaaaaaaagagggccaggagagaaagcaggagcaagagagaagaaagcagaaaagggccagggaccaaaggcacagggcaaggcccaagggcaaacagaaagcggaggcacaaaaaaaaaaaaaaaacaccagaagaagaaaagaaaaaacagggggcgagaaaccaggccaccaacagcgaaagcgcaagggcagaacaagacccagaaggacagggcccaggcgacagcacagaaaccgccgagcggaccgaacacaccagcccggggaaacaccaggacaccaggaagggggacccccccccaccccccgagggaagggccccaggcacaacggagggcagagaagcacgaaggccacccacccacagcccgagaccgcccccaaacggacgagcggcagccagcaagccccaccaaccccagagccccaagccgggacaaaggacagcagccaccagccgacaacaacgcgccggggaacagggccccgcaggcagcaagcaccaccgccgaccaccccacccggcaaggggacaagaaacgccaccagggcaggccgccgagagagcacacacaggaagccggccaaggccaggagcgcaaaaccgacgaaaacccccaaacacaaaaaaaaaaggaagaccggagcgaagagagaccggcaagaggacggcccgagagggcccagcacccacacggaacccaggggacagcccacccggccccgggacacacacacacacacacacacacacacacacacacaaaaaaaaaaaaaagggcccagagaggcaggagaaggccccgaggccagccggaacacacgggcaaaggagagaaccggccgcaaacgccaacccacaacacacggcgagagcaccccaccccaggggggggcaggcagggggaggagaccaggcaaggggccacgccaaccaagcacggggacaaggcagagaagcccgaggaaagccagccggaaaaaggaggggcccaacgagacgcgccagaaaacgaaaagggcggagagaagccagcagagaagagccgcccccaggggacgagcaacccagcacagaccacacggcacagcacccgacacaaaaagaaaaaaaacaaaacaaaagaagaaaccccagcagacagaccccaacgagaagccaggacacgaagccaagcacaggagggaacgggcacgggacaggacagagggaacgaggaagagaaggccggacagggagcagggcaggcagaagagccccacccaggaccaggaaggaaagaacccaacaaaggaggccgaaggggcggggaaaccggagggacggcaagcgaggcagagccggcgcaacaggcaccagagagcccagaaaccaagagcaagaccccgggagagagggagacaagcacaggggaaccagggcacaggggacccggggccggcagcacgagcccagccggacggcggggaccgagaggggagccccaagggcggagagagagggcccccagcaccagcccagccccgaggggggagaccaccccaggccagacacgacaaagaaaaagggaccacacagcagcggagagcccggaaagccccgagcacagcgaaagggcaccacacacgccaggccccccccaacgggcggaccccaaggcccaagaggaaggacacaggcacgggcaggccgcagcccccgaccgagcccggcccgcgggaccaggcagagaccgcaggggcaaagacacaggacccaagacccagagcgaaccagaggaccagacccagaaaaccggccgggcccaagcgggaagcaccacaggcagaggagaacaccaaggagcgccgaacggccggaaacacaaaagaggagcccaaaacccgaaacaaagccggaagggaacaccaagaaaaacaaaaaaagcggccacgggccacggcagcacgagcgcaacgggcgccacacagccccaaccgaggcacaaagaggccaaacggcgaggcgcccgcggccaccccagaaccagggcgggacagaagcgcagagggaggccgggccaccccggacccaaacggggggggacagccacccagcacgggaagagaagacaggaggacaaagaaggcaccggcacaagggagccagggccagccggaaaggagagccaccaaacaaaaaaaacaacagaacaaacagaaacaagaccgaggagagacacacacagagaccgaggaggagcagcggaaacgaggaacaaggaagccacggccaaaaagaagagcaaggacaccaacggccgggacgagcagaaccgcaaaccgcagacacaaaggaggggcaaaaggacaccagagggaagaagggagaaagaagacagagagcagacagaagagaaaaaaaggcggcaaaagggaacaacaccaagcacccaaaagcccccacacgccccccacccaccccccacccacccaccccaccggcccgcaccccgacgaggcaaaaaggcacgaccaagggccccccacgaggccgacaggccacgacaagcagcagagacacgagcccaggggggacggagcaaggcccccaagcccgggacccagcccccagagggcccggaccaccaaagcgacggagcaccaccgggcaggccccagcaagccacaagagacagccacggggaaagggggggcggagcggacaccgggcaagcccaagagacagaagagggcaccagagcacccaggaacggagacaggggggagccccgaggggcacgaaaacaaacccagccgaaagggcagcccgcgggcccacccaccccagacccacacagagggcaccacgccaaggagacaagccagaggacagggcagaaccggaagaaggacccgaagcacgagaacacacgaggcacggagggcccaccaggaagcccaacaggccccacagagacagggccagagcccaggcggcggaacagccaagcgaggggaccgaaccgacccccaagaaccaggaacagggcggccaccagccagggaaaggccccccgaacaaggaggcgacgaggaaaagaaaaacccgacaggcacccaggcaggcccaagcaagggaaggcgacccgacgcagaagagggaaaacagaggaagagacaggcagagaacaggagcgaggacacagcacaagggaaaaaaaaccaacggacagccacgaagggagcaagccgcggcacagccggcggaccaaaggggaaggaacagagaggaggaagcgagcaaaaggcgaacacgaacggagaaacaaccagagagaaaggggcagaaaggaggaaaccaggagggaaggcagccagaaggagcagggagcagcacgcaaacaaaccgaagacacccgcaccaccgacagcaaagggacaaccaagcacaagcgaagcacaggaaggacacaacgcgaaccccaaagaccaagaggaagccacccacccaaccagccagaagacaaacacaaaagagagagggaggaccaaagaagccacagacccagcccaacggggggggaaaacagggacgcaaagggcaagaagggaagaagggaaggaagggcaaagaaggggcgagaagggcaagggcaaggaagggcaagaacgaaagcacgcccgcagggggaacaaaaggcaagcggccccagccccacaacgagcaagaccccccgaacagaaggcaagaagcaggaggggccaagagccgccccagacagagcaagccgcagaggacacgcgacccagccgcagggcaccgagaccaaaccgggccaaccacggcaaacacaacaacgagcacgcccccagccccgccaccaggaggcacagcaacagggaaacccagggaaaccaacaggaagacacgaacacaggggcagggggggcggggaagcccccagcaccacacacggccaccccacgcaagcgggacccgggccggagagcccaacccaccccaaggccacaacccagcagacaccacaagagaaacccccggggcaacggaggcgggcgccaccccgacaagccccaagcacaaagggggaccaacccaggcccaggcacaaaaaaggaccacggccagggcacagaaaggcacagaaaaaaaagaaaacacaagaacacccagaagaaccaagaaggagcaaccgcccccccaagaagcagaaaaaaaaaaccccaccccccacaaccacacaaagcagccgcccaaagcacagggggcaagcaagcgcggggccaagaagccaagagacgccagaaacccgaacggaaagaaagacaccccagcagacgaaaccaaggcgccaaccaaggcacgagaaaaagaaagccgcacagggagagagaacccaagaaaacagccggccccagcaggagggcccgagaacccgccccaggaggagcacagcagggggcgcccgccccaggcagagggacccgacccacgcacaaaaacggaaaaaagggaacccagcaagcacccggccacacaccaggcccagacagaacccgcacagagacgccgacagccccagggggaaaccggggaacaaagacaacaaggacagagccagagagccaagcaggaagaccccagcccgggggcaacgcgggaagcaaggcagagagggcgccaaggaacaaaaccaggccagcacagaacccggcccagagaacagcccggcgagacacacagccacagggaaagaacaggaaccccagaaggaaccaggaagccgggccagggccgaccacacaagccccaagggcgagccaagcccaggcaggggagaggacagacacacaaaccccaggcccaccaggcgcaacgcggaagcaaggcaagcgcacaaggccgaagagggaggcccacccccaggaaggcacaacgcccaagacgcgagagagaaagcacacacacacacacacacacacacacacacacacacacacacacaaacacacacacacacacacacgacccgagacaggaagcgcagagggcaggggcgaacaagaccccgccccacaggcgggaccaggcaagccaccacaccgacagagaaaaaaaaaaaaaaaaaaaaaaacacggagcagcccccccccaacccccaccccagacgcagagcgaaacgaaaacagaaaaaggaagaacgggagcaccaaacgcgcccggccaaagcacaaagcccgacggacagccagcgacgagcgccgacagacgggagccccgcgggacggccgaggagccccaagcacgaacaggccagcagggagcccgccacacggacgccgacacgagacagcacagcagaaacaggcaaagcacagcccaacccccccgccccccacccccaccccacccccggaagaggccaaaaacggaggacagggcagcgccggaggccgaaaccacaaaccccccccccccaaccccccccccccccagcacacgcggcgacaaagcagccgcgggaccccggggccccaggcgccagcgcccccccccgccagacaagccgacagggcagcacgcgcagcccagccgcgcgcgcaccgcgggcgccaaccacgcgcgggacgcaaagcgccgcagcggcgcggggcgccgcccggcagggggcgggacgcacgggacggagaggggacgccagggggaagcggccgggaggggcgaggaccgcggagggggcggggcggggggacagagggagcgagagcgcggggacgggggaggccgggagcaggaacagagaggacagggagggcgcgcgcgcaggggcacaccggagccccacggccacgcggcagagagagggagggaagcccccccacgaggcgagcaaccaggcccggggccgaccacccgaaaagcgacggggggcggaccggaggccaaaacacccgccccaaacgccacgcaaagaaaaggggaaaaggaagagccccagccgaccccgcccgagcaacccgggcccgcgaggcgcagagcaacaggacgcagccgcgagccagccaaagcaggcccgggcgcgcacaagcagcaggcgcagcccgcgagccgggcagaaggcgcgggccggaaaacaggacacccacccgggggagagcccaccacccacaccaggaggaggggagcccgggaccaaccgccacggcccggccaagaaaagggcacccagggcgacccaacccacaagggcgagcgagggccgcgggggaaaagaaggacagacacccaagggcaagaacagcccaacgacggaccgccggaaacgacaggaaggggacaaaaacacacgcccaaaacggcaagaagcgggcagcacaaaaacaaaaggggaacagccgggggaacgcccccaacccccagcaaccccagcaacccccagagcaaccaaccaagaggaggcaaaggaaaccaggggacccaaagcccccggcgcagaccgaagcaacaaaaaaaagagaacaaacggccaaaaaaagaaacaacaaaagcgggaggggcggcacaccaacccagcacggggaggcacaggcggacccaggagcgaggacagcccacaaagagccagggcagcaagggcacagaaaacaaaaccaaccaacaaaaaaaaggaggcccagcggcgaaaagcgcggccggagacaccgccaccacacacacacacacacacacacagcggaagacgcggcgcggcaggaaagagacaagggcagagaaacgcaggaccaaaacgcgccccacgccaccagcaaagcgaccacggccccgccccgccccgggagcacgaacgcaagaacgagacccagaacacaagcaagaagagggaagacccagaagaacaagacgcacaaaagacacaaagaaaacaaaggggggcacccacacaggaggagccaccggcaggggcacgcgaaccagcccagcacagccccacaaaggccagccagaccgagcccgaaccacgggaaccgcacggccggacaaccacagaggagcaaggggggaaacaaaggaggagagccaggacaaagagggccagcccaccccccagacacaaaggggcaagaaaaaacacaccagccaacagcacacggccaaaaaaaaaaggcacaaaccagggggacaaggccagcccagaacaggaagcggaggcagcagaccaccgaggaggccagccggcacaaagcaggccaggcaggcaagagacgccacaaacaaacaacaaaaaaacccaaaagcgagaaccagccaaaaaaaaaagacgccaggaccccccaaaaaccccggcaggaagaagaagccaaccaagagggaccagggaaaacacaccagacaacaaacccacaaacacaagaaaaaaagagcgaaacgaaaaaacaaaggaaggggcaaaacaccggcagggggcagggacacgcgagagaccggcgagggcagccgggaacgaacccaaggcccagcagaggcaagcaccgcccggagacacggcagcgaaaagacaccaggggagggaaccccggcagacagcgggaaccagacaaccagcgcaaccaacacccaacacccaacccagcccacaaacaaagcacacaggggggggggggcccaccagaagggcacgggaagacgcaggcgcccccagaaaacaggaaggagggaccagcagacgaagcgggaacgcacggcacagccacaacggagacgggcaagcagaagccccaaggagaaaaccaggcgcacagaacccaggagagaaaaagagagcacacgcggaccaaagagaaacagccagccccagaacagaaggcaggcagagaggggaccccagaccaaggagccgcccaaacacgcagaagaccaacgaacaggaagggggcacaccacaaacaagagacaaagcacgggagcagggaagacgccaaaacaggaccccaaaacccccccccacaacaagaaccagcacaacacgcaaggcacaaagaaaagcgaccggaagagaggcaccaaaaaaaaaaaaaaaaaaacagcaccaagaaacccaaagcaagagccacgaaaagaaaaagcaagcgagaaaaaacaaaaaagggaagccccccaacaagcacaggaccacccccccccaaagagcggagcacaaacaacgaacagccgaaccccaaaacacagccacacccaggagcccccaccacaggccaagagacaagaaaaaaggacccgcaggaaccccgcaggggacaacgccagagacagggggacacaccaagaagcccccccggggccacacacccacccacagccccaaagagaccccaccccaccaagagagacgcaggcccaagagcgacacacaaaaccaaagagcagacaggacaggacaggcacccaggcccggcggccacgccccaacccaacgcagagggccgcaccagcgcaaagcaaacaagaccccagagacccgccgaccacggccccccccacgcccccccccgacacaagcccaccacgccgaaaaccccaaccccaacaacaccccagcagcgacgccacaacagccgcccgaggaaaaaaaaaaaaaaaaaggcggaaaacacaggccccaaaaaagcaaaagaaaaaaaaagacgaaacgacaaagacagaagcagggaacccaagcggggaaaaaaccggaagccagaacacacagagacagagcacagaaagaaaaaacacccgacaaaaaaaaaaaaagcaaaggaaaggggcacaccaaaacaccggggccagggaaaggaaagaaaagcgaaaccacggagccaaacccagaggaggccacagaaagacacaaccacgaaacaaaacgaaaagaaaaaaaaacaaaaaccgaccgaccaccccaccccccccacacgagcaacaaagcacagcagaagcagggggaaccgacaccacccagcgggacacaccacaggcacaaggacaagaaaagacaaccgagggccccgggaccggcagagaggccagagaaagaccccccgacccgccccgccccacccaggacaacacagccaagcccgaagccacccaaccaaacacggccccaaacaggcagacggccgcacagagagagagaaaaaccacaggggccgcgcgcggacagaccgcagcaggaggcacggggagaccacggcgagaacagacagccacagcaaaaggcaaagacaacaggaacacagaggccaaaccagaaaaaaggcagaaacacaaagacagaccaaaaggagccccacaaagcagggcagggaaacgaccgcgggggggggggggggacacgcccagagagagaccgcggaccgagcacagaggacaacggcaacagcaagcccggcgaacaccacaacggaacaagaaacagaggccgagggcaccaagaaaaaccagacaagaaaacgagccaggcaaggagaacgacacaaagaaaaaaaaaaaaggaaaaacaaaaacaaaaacaaaacaaaaaacaaaaccaagaacaagaacagaaagagcaagcgggaaaccacaaaaaaaagaagccaggcggaacaacacacaaaccaagagacagaagccagagagccgacaaggccaagacaaacacccaagcaggggagagggaggccggacaaaaccaaaaaaaagcacaaagaagaagaaaaaaaaaaaacccacaaaaccagcacacaagggcaccacacggagcaagaccgaggacaaaaaacaacaccacaaggcaaaaaggaccaaaagaaaagacaagaggccaaaaaagagaggggggcgcagaaaaaccccagaagaccacaggccccacagaacagaaccagacagacacaccaaggaaaaacgcaggccccacccacacgggcccaccacgacaggcccacaggccccggcagcaccaaggcggacacaacggcacacgcagaagcaccgcacaagggggacagcacgcaggcaagaacgaacacgagaccaaacacaccagaacagaagaaaacacgaacccacaagcacccggggccgcaacacaaggagcacccagagccaggcggcagcaggaaagccaccgaccacaccacccgacaacaccacagcggaaccaccggggggccaccgaggaggaggagcacgcagcacgaaagcacaaccggcacggggcagagcaaacacagcagcgccccaaaaaaacaaaacaaaacaaacccgaacacacaaggcaaaaacccagcagcacccgacgaccagagcaagagcgaaccggacaagacaaaccccacccccccggaaaggggggacaccgggggacggggaagcccggacagggcccccccaccaccccccccaccaacggccccagccgagagaggccagcgaggagaaagacagacagaaggcaacacaagcagaaaaaaagaggccaaaaaaggcaacaaaacagcagaagcaggccaaggccaaaaacaaacaaacaaaaaaaaaacaaaaaacaaaaaaaacaaaaaaaaacaaaagcagccaagcgcagccacaaagaacagcaacgcacccaaagagcaaacacagacagccaacaacgaacaaaagaagaaaagccaaagacaaccgcgcaaaaaaaaaagaaacacaagacaaaaaaaacaaaaaacagccagagaagcacacccgcggaaaaaaaaaaaaaaagaggagacaaacagcaacaaggagaagggaaccagggccgaacgcagaaagcacgagcccccccaccacacccggcgaggaggagcaaccccgcagaaggcccaggggacaggagcccaccagaggacacccccacgggcaaagacccccgcagcgcccgcgaagcgcggagcaagggaaacagaacggcgaagggacagacgggcacgcacaaaggagaccccagccgccgggcagaggggcagcacaggggggcgcggcgccagagaggagcgggaggcggcaggggcaccggcccagccccgggcgccggggccggccccccaccccggggccaagcccggcaagaggagggagagggcgggcgcgcgccccggggggaggaaccgggggcacgaggcggacgcccccggcagcgcacaaaacagggcgccaggggacggccacgggccgccaggcgggggccggggaagaggagaggcagagggggggggagacacaaaagaggagagggggaggggacgagccccgggaagggacagccaaggcggccaccagacagggggcccgacccccccggcggggaaggcccccgcgccgcaacggaaagagacaggaggaagaaaaggaagaaacaacgacccccaaagagacagcccaccaaaaacacacaagcgcacgcagccaaacaccccaaaaagggccgagccgcacaccaccccaaggaagccaagcagggaccgccgaaaggcccaaccccagaccagccaggacgcaagcagacaggaaaggggacgcgccccacgcccaccaagaaggcgggaaaggaaaaccccggcgcgccacaacccgcgaccacccgggcggcagcagagggaccacggccacaagccggcagccccgggccgaccaggaagggcgggcggaaaggcaaaacggcaggaagaaggacccaccacccacccacccacccacccacccacgcgcacacacgcacgcgcgcgcgcgcacacacacacacacacacacacacacacggggggcgggcgccaaacgcgcccaaccccacgcccccacccccccccgccccgcagcgccccaccgcagacccgggccccgggcccgaaacccaacaaccgccgcgcagcagagccggccccgaacgcccgaagggccccgagggccggcgggcagcgccaggagcggcccgcaccgcaggccgcggcccagccgcccccgggcgcgcggccgccgcaccccggcgccagccgcggccccggccgcgcggaaagcgcggccggacccgggcgcgggcgcgcccccgccggccgcgcgcccggcccgccgccgcgccgacacagacgccgggcggggggcccaaccggcgggcgagccccaggcccgggccgccaccgcggccaggggccgcagcacggccgccaaccccagcgcggcagaaccggaccagaggcaccagaggggcggaacggcgggcacgccgagggcgggccggcgacagcccggcggcccccagggagaacccggggcaccaggagccgcgccggcgcggacgcgcgcggccgacggggaggccgcacccgcacgcggcgaagcggaggccaggcgcggggcacgaccggcgccagcgggagcgcccaagccgagcgcgcgcggcccggcgcccgcgggcccagcgcggcggcggcgcagcagaggccggccgacagggcggggcggcggcgcgggcggcaccggcggggagcggcccccgggaagcagccggagcacgccagcggcgggccgccgagacgaacccacgcggcggcccccgaggacgcagccgcggcacacgggcccggaagcccagacaggcccagggcagcggggcaggcacacagaagcacgacggcgccgagaggcggccgccaccgccaccgccgcggccagccgcacagcccgccgcgccgcaggaggagccggggaggggacgccgccgccccccgggacccgcgcgcgcgcgccggccggcccaagcccgcgcgcgcgacagcggcggcggcggccgcaggcgaggaggcggcggcggcagagcccgggccggcgcggcg

SEQ ID NO: 759 - RNA, 2673 nt, Mus musculus
gagaaacccgccaaaaaaaaaaaaaaaaaaaaaaaaaaagcgacccacaggcccagcgcccaaggaccagagcacagcagccccagaaaaaccaaaagaaaccacagccagcaggaaccccggacacccgccccaggaaggaccggaacaaacaaaagcaggagaacccacagagcaaccagcagccaggcaaacaggggccagggacaaggagaacggaccgggaggccgagggcaccccacaagaagacacagggcccagaaccaggacacaaggcccaaaccgcaggccccgcccaccacagcacaggcgccagggggaagggggaacgccagaaccacacgggcccccacagggagccgcgcaggccccagcagggagcgaggaaagaacaggagggaaaagaacacaggagcaggcagaaaaagcgccccaccagcgagcccagaacaaccaggcccgagagcaccaagagccaagacgggcccgaccccagcaggacaacagacccaaaaccaccacacgggagccaggaacacagacacgggacagcccgaggccaccgagaaaacaagggaaaggcggagggcagcagccccaaggagggcccagcccacccagaaccacaaaagccaccagagcagaaacgggagaaaagaacaggagcggaggggcccaggggcagaggcgccagcaacacaacccgggaacccagcgcaaaacaggcgagccaaaccaaggcaggagaaagccggacacacaccaaaaaaaaaaaaaaaagaaaggaagagggagggaaagaaaacaagggaaagaaagagaggggagggggagggaggggacaagggagggaccccagagaccgaggagcagacaccgcagaacaaccggccccaggcagcagccggcaagcccacaagccacgggcagccaacccaagcggacggagaccacagggggccgccagcaccagggagccaagagggggacggagaagggaaggggccaccaccagagggacaacgaaaaagacacaggcacgaccgccacaccagagccagaccaccaccagggcggcccgcaacaggacagcacgccaaccgccgggcaccgcgccaacgagggcaccgaaaaggaagggggcgaggcagaaacacacaggcagaagcaccaggggggccgagggagccacagacccaaagaaccaccaggagccccgcccaccccagcaaggcccgacccccaagaaccaacccagccacaagacggcgacgaaagacccaggcccgcaacccggcccaaccccgacacgggcccgggaggcccgcgccaaagaccgcccacacgcaccacagagccgaccccacccaggaaccggcgcaccagaggccccccccaaggcaacgcgcaccgcagcccagaggcacccggcggaagcccggcgcagcagcagcgcccaaagaagacggccaacccgagccgccgccgcgcacacccagcaagcccagccgcccgcgagccagcaacgccggcgggcgccgaccagagacagacaccagccaggccaccccaaggccccggccggaaggaagcgggcccccccgcgcccccagccgagccaaaccaccgcgcagcgacgccagccaaccgcagccgcaacgcagaaacaagaccgcgcgacagcgccggaagggaagaggccccgaggccagccgacacacccgcccagccaccgggggacccccgggccggggaggggggagcgagacccaggcgagggcgagaagacaggggccacgaggggcacggccgagacaacagcggcagccagggccacacagacaaccacaggaaggaacgcaaacccccgaggcgacgcggccggcagcccgggaagccagggcaaacgaaaggcacccacgcaaacggacaagacaagaaagacgaaagccaccaaaaaccagaagcaaaccacagaggacgccccagccgccccccccccccgcgacaaaaaggcgggaaacagagagacggggcgaaggagaggggcgggcagcagagacagagggcccaggagacggagggagggggccggaggagcgacggggcggcaaagggcccagccagggggaagacagcccaggagccggaagacccccaaaaaaaaggggaggaccagaaggcccgcaggaaacagaagagccgagcaagcgcggaccccgaccacccacacaaggcaacgcgagaaggagaccccgacagccaccaggccccggcacccagcaagacgggaggcccaaacgaacagcccaaaccaccacccacgcccaggcacagaggacccccaaaaccacgcaggacagggcgcaagacagcagacggacagacgcagagaggccgcccaccagccagaaccggccaccggaagaaaccagagccccccacacacgaacagacaggggcggacaagcaccgcgcgcccggcagaccaagaccaagagcacccaggaagcccggcaacgaccgacaggcacccacaccgccccagcgccagggccacggagggccgccccgcaaggccccaggcagcccggagggccgcaacacaccaccccgcgccgccacgggagccaccaccgcccagagcagacgaggccacggaccagcccccc

SEQ ID NO: 760 - RNA, 1644 nt, Mus musculus
caacccaaaggaagaagagaaacagcaagagcggaagaaagagcaagagcagcaaaggaagggaagggcaaaacagcaaccagagaaaggcgaaccagaccgaagcaaagcaccagggcacaacccccgccccacccccccccagccggacaacaggcaacagagagcaaggcgcgagaccaaaccacagaaggccccggccagaggcaggcacaggaaacaagccagcaccaaaagaaaggcgggagacaagaaagaggcccaaccaccccccgaacaaaaaacaaagcgagaagaaggggccggcaccacaaaacaggaaaaagaaacagcaaacaagacaagaagagaaaaaaggacaaaaaaaaaaaaaaaacacacaaagaacacacacacacagagaacaggagcgaaaaagaagaaggaggcgcgacagagcagcacagaggaagcaacaaagggaggaaaaccccccggaggaccgagccgagggcggggcggccaggcaagaccagggcacaaaaacaaggcaagagaaacccacacgacagcaccagccagaagagaaaacagacgaagcaaacagaaaggggcggacggacacagggacggaggcagcgaaggaggaaggacagggagcgcggagggggaggagagacagagaacaggaaagggaagggggcagcaaaggccaaggaggaggggggcaggaaggaaaaagcaccaggaggcagaagcaaaaaaaagaccggcgaccagcccacggcacgaggggaggggaggggaaaaccccaggcgcccgaaccaggagaagggagcgggagaaggaaagaaccgacccaacccagaccacagcaaagcccaccccgcgcaaggagaagaaaacgggagacacacgccacccccccccccccccccccccccccccccccccccccccccccccccccccccccccccccccccccccccccccccccccccccccccgccccccccccaagccacagccccccgccccccgagcccagaagggaggccccaaaaccaagagagagcaggaacagagccggagccgagagggaacagagcgcggaaagcaaagaaaggaaagaacacgccaaaacccagcaaaggccagccccaccacagagccgccagggccccaccaagagcaggcaaagacgagaaacggccagaagagaaagcagggggagggccagagccccgcaaaccccgcccgaggggcggaaagcccagcgcgcaccccagcccagcggggggcagcgcaaagcaggcggaacccgaagccaaaaggagaggcacggaccacagcgggcaggagccgaggggcagggagaccagaagcggggccagcagagcaacaggggccggcacagagagagcccgaccacaagcaaaggaccggagccccaggcagagagagacagccccagagaagcaaggccccccggcaggcgggggagaagaacccacaccacaggaagccagcggccccaacaagccgcccccagccagcccacccacccaaaccgacaaacagggaagcgaacgcgcgcaacccacccgcgggacccccgggaaccggaggaggaggggcggagcaggaagaacagacggggc

SEQ ID NO: 761 - RNA, 10126 nt, Mus musculus
ccacaggggaaccaagagacaacagaaaagagagaggcagagcacagaggccagcaaaaccagggagcacccagagaaacgaacagaggaaggccggggaacacgagcaggaacagaggaagaagcccgggggagggagcagagaagagaggggagaaaagagaaggaagaagagcaaaacgaaacagcacaccagaccaggaaaaaacaaacacacgccacaaaagagcaaggcagaaaaacagaacaggacaaaggcagggagcccagcccacaccccacaacgcccacaccccacaaccccggagccccaaagagagagaggccgggcacggcgaagacggacggaagcaccgggaaaccgacacgccacccgcggcgggaagcccaggaagggggcagagacaagccagcccaggccagagggggagggggggagccgaccgcagagagagagaagccacccccacccccgacgaagcgccccaccccccccgcgccggaggaggaggagcccagcaggggccgagagaccgagagcgacgagaaacccgaggaagccaggaagagagcggggaacgggacaaggccaggacgagacacagaacccacagcagcaccgcgcagcccacaggacgggcacggcccccgagcaccccagcagagcggcgacaggaggcgaaggaaacagccccccacccgccccccgggcccgaaagagggaagccaaaccaacagggcgaggagacaaaaggaggaaccgggcgggaccagaggggcaccggcgcaggcggacccccgcccccaaaggcgagagcacccggcgagaccgacacagcacacgcgagccccacagccgcagacgaaccaccgggcacaggccaccagcccgccaaccgcaaggcgaggaacacacagagagaggggagaaaccaaaccccacacagggacaaagcgggggccgaggagaagccacccacgcaggagcgaggaacgggcggggacaccccagacacgcaccggaggcacgccaccgcccgacggcacgcagacggcacacagaggcccgacccgcgccacagaggaaaacagaaacacaacccaccccaccagggcgggccgcagaccaggcgaaccacaggccccaagcggagaccagaccccaaagagagcccgaggacagcacagccacagcacaggcgccaccccccccgcagcgacagccgagacgaacggacaaaaaacacaaaaaaacaagacagcgagggggagcaacaaagacagaaaacccacaaaccccaagcacagggcaccagaagggcaaggaagcagggcacgggggcaggaggcagaggcagggcagggcggggcggcacaggaggggaacaggccagcaggcccagaggcacaagccgacccgcagcaaaaggcggggacccaaccgaccacaaggggccgcacaaaaggcacaaacgaacacagaagaaaaggaaaccaaaagcaacaaacaaaaagaagaaaacaaaaaaaaaagaaacccacaaagcgaaaggagaagaagaccagcaacagaaaggacacaccaaagcagaaaacgaggggggcacacgccgaaccagcacgggaggcagaggcaggcagacgagcgaggccagccggcacaaaggagccaggacaaccagagcacaaggagacccaccgaaaaaaaaaaagcaaaaggcaggaaaggacgaacaggaagaaaccgaggagcacaccaagaagacgacggccgcaacaagagcagacagaagcggggcaaaccaggacgaacaacccagagcgcccacaagagcccgggccggccgcacgcacgccgcaacacgagacacggaaagaccgagacaggagagcgggggagggcaaccgaagaccggaaagggggagacccgcaggccgagagaccaaaagcaagccacacaagagcagccaagaaacgcaggcgaaggagccccgacagggggacgacagccacagcggcgagcacggagcaacgacgcccacaagacagcacggacacccagggacagggagggggggggggggggggggggcgcgcgcacgcaggcccggcccgaaacgcggggggagacaggaggcccgaagagccaccggggaacagggagcggcgaggccagccaccccccggccaggggcaggcacacagggccgccacaccacccagaggccagagacagcccagagcaccgggcggggcccggaaggacagccgagcagcacggaaggccagacgcgcccggccgcccagccgccaaggcaaagcacagcagccacacgaccaaaccgagaacggagaccgcagcggaccgaaaccgaggcacccgggcgaacaacacagccagccacccggagcagacggagggcgggggaacagcaaaaggccgccagagcccgggagcacaaccggaaaagggagaaccacccagacccgacaggagcagcgaccgagcgcccaaaaaccacagggaaacaaaagcccagcgcaaggggcggggaggaacggggaggaagaaaggccaacacaaaagaaacaaaggccaaggcaccagggaaagcacacaagccaggaagagcaagaagaccacccaaagcccccgccaccaccacaccaccccagccccagaagccacgaaccaccaagagaccagcgggaaacagcacacagacaagacaaggaagcccaagagcgcccagccgcaaccaaaaccagaaaaacagcagccccacaaggcccagagcacggccagcacacacgacaggacaggaagcaccaagggcgggaggacaacggcggggcagcaagaaaccggagcagcggcccacccagacggagagagacaaccacgagaacagcagaagccaacaaacgcaaacagagcaggccagcggaagagaccccaggacaaacaaagagaaggcgggaacgcagggaaggggagccccagcccgcacccaccccgagagcagagcgcaccaggcaagcggcagggacacacccgcgacggggccccaaggcacaacaccaccaccagaagcaacgaggcgcagagagacgaaccaccgccgggaaggggacggggaagaaggcgcagggagcaggccggcacgcaccagaggaaggcaggcgccaggcccaggcaggagaagaggagggcggagcagaacagcccagaacagggccggggaagccaaaaacaaaggcacaagccggcagacccgagaggaggaaaaaaagccccagacagcacaaaaacgacagacaagggccaacgggcaggcgacccacccccaggaccgcaaggcaggcccgccacacgggagggccccaggaagaggagaagccaagaggacaaggccaggacaggaacacaggaaggcagcccgaagccggagaggcaacaaaacagcaaaaagcaccaggcgagcacggagagcagaagagaagaagagcggcccaccccgcacaacccaaacaaccgacaccccgccgggcccacccacaaggaccagccagaagcgggcggagggggggcagagcaaggaaaaacggcagagacacaaaaaccgacaagcaacgcccaagcccccggagccacccagaaagaccaaggaaggaaaaggagacacagcaggcacaggaagccagacaagagccgcagccagcccccgccaggggccgccacagcacccgggcggcccccacacacacacacacacacacacacacacacacacacacacacacaacacacacacacacacccacagaaagcggcccaaacggaaggcagggaccccccgccccagggacaggccaagagacagaccaggccgcaaaacaaaaaaaaggaaggaccacccagagccaagggaagaaaagccaaacaaaacaggcgaggaagaaacagaacaggcaggaggagcaacggccaaaagaagaaacaggaagacagaacaagacgaaaggaaaaaggagagaaaggacgcaacaaaaagaaacgcacaaggcaaccgggcagaaaggaaggaagccaagcaggggcaaaaccaacccagcaggagaaagaaacagagaccgagcaggccagccgaacaaggagcgggacaccagagaaagaagacccgacaaagaagaaaaagaagaaagaagagaaaaaggaggaggaggaggagagagagagagagagacagagagacagagagagagagagagagagagacagagagagagagaagaaggggaagaagaagaagaagaagaagaagaagaagaagaagaagaagaagaagaagaagaagaagaagaagaagaagaagaagaagaagaagaagaagaagaaagagggggaggaagaggaggaggaggaagagagaaggaggagagggagaagaaaagggagagaaggaggaaaaggaggagaggaggaggaggagggagagagagaggagaagaaggaggaggaggaggaggaggaggaggagagaaggacaaggagaggagacggagacggagacggagagacggagacggagacggagagacggagagaggagagacggagagacggagagacggagaacggagagacggagagacggagccggagagacggagcaggagccggagagacggagagacggagagacggagagacggagacggagacgaaagaggaagaggaagaggaagaggaagaggaggaggaggaagagaggaggaggagggaaagaaggggaagaagaagaaggagccgaaaaagacggaccaggggacaaagccaacagaagcaaggaaagggagggagagagacccaccgaggagcaccaccggcagggaaggaggcaggcgcaggaacaggaagcgggacaccccaggcccggaaacaggacaggaaggggagagccaaacccaaggccacccccggagaaccaccccagcaggcccacccccagggacaaccccaaaggcggagccaggcacggcaaacacagagcaggggagacaccaaccaaagaacagcagccgagcagcagaggaaagaagaggaacaccaccaaagcgagggacaaagcgacaaaaaaagaccaagaaagaccagaaaagaggaaaagagaagagcgaaaaacaaaccagaacaacagagaaaaccagaaaacacgagcaaggcacagcagcaaagggggacacgaagggcacaaccagaggagggcaacaacaggcaaagaaagcagcgacccagcacacccaggaaacacaaacagcaacacaacaacaacaacacaacaacaacacaacaacaaaacaacaacaacaaaacaacaacacaacaacacaacaacaacaacacagcacacaacacaacaacaacaacacacaaaacaacacaacaaaacaacaacacaacaacacagacacaacaacaacacaacaacaacaacacacaacaaaacagcaacaacaaaagaaagacagcaaaaggacgcacaaggaaaggggggggaacaaccacaaagcagacagaaagccacacacacaagcagcaacacacagcacacacacacacagcacacacacagaaggaacaaacacaaacaaaggaaagaaggaagaaaaaggagaggaaccacaccacaaacacacaagaacaaaaagcaagacagaacagacaagccacagcggcaaaagaaagggggagagggcaagaaaaaaaaagacaacacaaacagccccaacagaaggacaaagccagaagacacaaagaaacaacgaagggaaagaagcaggaacggaaaggagaagagacaagaaaaggaaacagaacgggccagggccaggaagagacaaacaaaacaaaaaaagcacaagaaaaagaacagggggcacgggggccacggaagaagagcccaaagagaagcgaggagagggagcgagagaggagacagagggcagggagggcccagcagaaaggcccggcagccagcaaggagccagggggacagacaccaaaaaagccaggaaaggcggacacaaacaggggcgggggagcacggagcgggccagacagcaagccagcagagacggggcaggagagaggcgcccaaaaaagaaaaagaggaagagaacagagcccaaacagcccgcccacacccacaggcaggggacaacaacacagcaaaaggcacacacgcaaccacacacagaaacacaacacaaacacaaaaagaaacaaggaaaaaagcaaaaagagggccaagaccacgaccccagacaaaagcggcgaagaaacagggggccccccccccaagaccggcaaggagcgaacaaggccccacgaggaggaacgggggcagccagcaacgccaagaaaccaccagccccagggggcccacccagggggagcggagaccagaacccaccaagccggaagcaagccggaggaaagccagggaaagaccagaaccaggcacccgacgggcaccaggcagcagggaaggcgccaaggcagggacccagggacaagcaggaccaccgcacccacacacgaggcggcgaaggcacggcccccgaggccaccaggccgcgcccacacagacaggcccccggccaggcagggcaccggaagccccaccccaccacaacagccaaaaaaagaaagacgcagagaccaaaggagcagagcgaagaggggggagagcgggcaggaaaaaggcaggagccccagaacaccagaacagagaacacaccacgcacagaaggcacaccaccacgcaccaagcaaggccgacaaaacgaaaaaaagagaaaaacgggagcagcaccgaagaaacacaaagccccgcccagagaccgcagcgggagagaaaaacaaaacacaccgcggaagagacgaagccaaaggggcaaggcaaagagagggcaggaggcacaagggaaagggagaaagaaacagcccccaacaggacaagggagcagagccaccaccgcgcccaaccccaacacccaccaacccccaggccgagaggagccgagaagcgggacccagcccagagaccagggcaacaccccagcaagagcccccagacaagggagggggaaaggcccacccccaaagacagagggagcggcccccgccaagagcaccccaccggccacgccggcggcaagcaacggcacagggcccgacccagcagggaaaaggccaaaacgcccaccgcccacagcacccaagacacgcccacccaagaggggcagagcccccagaagcaggacacgaacagcccaggcgagaaggggcccacggagcccacggcgccaaaccccacgcagcagaccgaccggaaggcacaagcaagaggcacccgaaggaggcggggaaccaaaacccaagcggacaggaggacaaagggagaggagggggaggagggcagcgagagcgaggagcagggaggcacagcacaggcaggaaggaccgggaggaaggggagaggccacagaagacccaagaagaagaaccaaggccccacaggccagagcccggaggaagacgaccgccggcccgcggcgccacagagggagacacccggcccaggacccgagaaaaagcccggcccacgagggggccaccaggccgccaaaccgcaaacagggccaagggcaggcgccccgggcgcagagggaaccgggcccgcggcgaccaccccagagggcggcccccaccacccagacacagcggcccccaggggaagggcagccccccaagccgcacggcccagacaaaagaagcacaaagcagcccggcccggccccacccacaccgccaagacacacaccccgagaggcagcccacccgcgaaacaccggaacacccgggcggaacaccgcccgggcccaagcgagacagggggaggaagaaaagaaaacccaaagcacaaaaaagcacaggggcggggggggggggcaaaagcaagggaacagccccaaaccaaagaccggccgaaaagggcccagaacccggccgaggccaggagaacaaaggccgaggaaggaggagggaggaggggcccacccccaaaccacccggcaagccacagccagagcacgcaaagcagacacacccccccccccagaaagcggcgccccaaggcggaccaaaggccagggcgcgggaagcccaccgcggcgccaggccccccccagagaccacaaggaaccaaacggggccccaggcccagccaaaaccagagcagcccagcaggaccccaccggggggggaggacagcgggcaagagaaagaaagaacaaagcagcccagggagaaccggccgggaaaaagaccagccacagggagacacagcggccagaggggggcgagggggcgggaggcgccgaggggccagggggaaaagaaaagcacccgcacccacggagccaaagacaaaaaaaaagcaaaaaaaagggaggggggggggggggggggggggggcgcgcgcggcgcaggaaacacagaggccagccccaccagggggcgggaaaagccagggccgcgccagcaaggccgcgcgagcaccggggccagaaccgaaaaacaggccccccaaagaagagccgccccccccaccacccgcagccaccgacacaaagagcggaaccccaagagcgcgagagcccgccccgcgggcgcagggaccagccacgaaggaaggcacacaacacaggccagaaaaaagccggcacccaaaggcaggaacccaaacccaccacacggcaccaacgaaaacgggccggggccacccacgaacacaggcggaggcccccggagcccagcccaccccccccaagcaggcaaccgcccgcccagccagccgccaaacaaaggcccgccccaccccgcccagccagggcggcaacacacgacaaaaaccaacggggaccaggaccacaggacaggagaccaaaaccaaaacaagaaccaaccccaacaccaagcagcgagcacagcggcagccgccccagggagaacaaccgaagagcaacccggcacccagcgccacacagagcccgacacaagaaccgggcgcagacaccagagcgggggcgcccgcggcccaaggacaacacaaaaaacgcagcaagcagaagcagaaaccgacaacaccagaaacacagcccaagcacaaacaccaccgcagcaagcccaacagagaggcgccagcccggggaaccgccaccaaggggccaaaacagaagggacaacaggcgccccccccgaacaacagacacgcaggaccagaagggccggcgagaggcaggcaggaagaagaagggagggcagggcaaaccccgcacgaggccaaggaacaagagaagaaaggcagccagaggaagcaccagagagcaaagggcccgccacccaggagaaaaacccggggggagcgccccgaagggacaagaggacgggaagcaggccaccggcaaagagcagcagacacagcaccacgccccgaaaccgcaaaaagagaagcccacccacaacagcagaagggccaaaagccacacagcagagagcccccccccccccccccccggagcacgggcagaaacccggcacacaacagaacggccaagcacccacagaaggaaagaccgggacaggcagagaagcaggggacccccaaaggaaaaggcgaaggaagcccaggagacaggcagccagggggggggcacaccaacccagcaccgggaagcagaggcaggcagaccggaagcaagaccagcggcagagaggagccaggacagccaaagcccaaaaaaacccgcgaagaagagagagggagagagagagagagggagagagagagagagggagagagagagagagagagagagagagagagagagagagggagggagagggagggagagagagagagggagagggagagggagggagagggagggagagggagggagagagagagagagggagaaggagagagagagggagagggagagagagagggagggagagggagggagagggagggagagagagagagggagagggag

SEQ ID NO: 762 - RNA, 1070 nt, Mus musculus
accgagcgagaacccaaacgaaacgcccaccccagacagacagacccaaaacaggacgaaggcggagagccaagcccccaaagccagagggacccagggggaacgagaaggaaagagggggcgagagaaggggacaggggaggggggccaaagaccgaccggagcggagagaggccagaggaagagcacgacgccccagaggccgagcaaaccagcaaccacaggggccgcaaccacgaagagacgagcccccggggcaaagacagcacaggaccaaaaaaaaaaacaaaaaaaaaaaaagaccgaccagccacggcgccccccccccccccccagcccccagcagcccccccccccaccaggcccaagccgccgccacgccccccaccagaggcaagccaccaccgaaacaaacccagaaacccgggcggaacggacaaggccagaacgaggaagggcccaacagccaggcccgagcccacaaagggcccggggggcaggcggcgcagcgcacccagggcccccggccccggcgccccacccgccaggaagcgccgccgaggcgaggccaaccgcacagacccggccagaagcccaaccgcggacaagagcccacggcagcggggacagagaccccgggccgggagcacaggggcaccgaacaggcccacccgagcacaaacaccccgagacgcagagggccaaaggaacaacgccagccaaagaaaaaaagaagacagagcgccagacaccagaagagggggcagacgacggaggggagccaccaggggcgggagaaccggacccggaagagcagcagggccaacccacgagccaccaccagcccgccagccaaaaggccagagaacagaccggggcccccccccggcgcaggcgagacggaagaggcgcggcggccgaaaggacccagaaaccaaggcaggaaccacaaaggaaaggagaagacaggccacggagcccagcgccgaaacacccgagaccagacgacccaagacccagacgccacccgcccgagggcgagaaaaaggcagcaccacagaaggacaaag

SEQ ID NO: 763 - RNA, 2434 nt, Mus musculus
gcaaagagaccggggccagcagcccgcccgcgacccgcagggccccaccaacacagccccacccagcccgagggcagaaggagacggacaggggcggaggagggcagcagcgaccccaaaacgaaaacccaaccaaaaaacagccaggccagacgaagcagcacaaagccaacaagcagccgccgccggcacaagcagaaaggcgggcagcacccccaggcagaacagccaaccggagggcaagcagaaaccaacccacagagccccaccaggaagcccccggagaggccaagacccagacaaagcccaagccaggaaggaaagaagggccaccgggcgagaacccagaggaaggaggagaggggcccacccaacggaccaaacacaggaaagaggcacagcacacacacacacacacacacacacacacacacacacacacacaccccagaccaaacaggaagcaccaacacacagcacacacaacaacaacaaaaaaggccagaaacagaaagaaaacagcagcacacaacaccaaggacacacacagacacggaacaaacaagggaaagaaggccacgggaaacaagcaaaggggacaaaagagcaaccaaaaacacccaaaagccacgcagacgcccagcaaaaaccagacaaaggccgaggaaaacggagagaaagaacagcaagcagaaaagagcggaagaaaaagcaccacgccaacccagagaaagcagagaccacgaaccgaacacagagaccaggcacagacaggagagaacagcaaacaccacccagaccaaacgaaaaaaaaaaaagagccggcaagacagccaggggagcgacgcgccaagccaagaccgagccaccccgggccaacaggggaaggaaagagagagcagaccgcaggggcccggccagcacagcacacgggaggagaacccccaagacccacacacacacacacacacacacacacacacacacacacacacacacacacacaaggaaaaaaaacaaaaaccaaaaacagaaaggaaggcaaagggacaccaccacacacaaccccgcccacccccccagccgccccccccccaagcccccccccccacacagccacaacacgcaccaccacacaccacagaggaccagagagagaaaaacaaacaaacaaacaaacaaacaaacaaacaaacaacccaacagcaccagaagagccggccaggagacagagcacagggaaaaccggcaggaaagacccgaaaacaggcaagcacacggacccagcggcccaacaccccagagggcacaccagccccccccgggggggccagcccagggcgaaagggagagaggacccgcgcaccacggggggaaaccgaccagaggcaccgagcagcaaagcacgaaaggggggaggggagcgacaccaaaccgagaacgaggaaaagccacggacggcccgcggacccccgggacggagaagacgggcgcgcaaccaccagacaccgcaccggcaagaccccgagagcgcccggcacccacccagcccaccccgggcccccgggggagaacaaacccacagaccgcacaccaaggacacagaaagaggcagggacgggggcccaccaggcggccacagaacaacccagcaacagcccgaggagccagagacagggagggccacacgccggcgcacccccaaaccacaacgaacaggggaaagcccgcgcagaacagccagccaaccaccacaaaccacagacacccaagacaaccaaaagggcagaggaaacaccgagaacacagagggcaccaggagaccgaaccgacagccaggacaagacaacaacaggcacaaaaaacacccccccccgcacaaacccaagagcggcaaaaaagcaagcacgaggagaggggagacacccccagcacacccaagcaacgaaagcaaagcaaaaaacaggaggggacaaagaacgcgcagggcaggagcaaacaaccccacaacagccagaagaaagccaaagagaaccgggacccggagaagggggcacccacacagcagggaaccccgacacaaagcaacaggggcgggggagggcggaaaaggaagaaaggaagcggacgaacggcgcgcaaacagcacagcacaggaacagcacaggaacagggagccaaaagaaagcccgccaccagagaaacacgaaaaccaggagccggaaagaggacgcccacccgcccgcacccccaccaggaagcccccccccgcacaaaaagccagccaaagccccaaccggccagaggggagaaacaaggagagcccaggccagaggcagaagaggaaacaaagagcagaaagaccgggaccaccaggagcaagagaggaacagggaggcggaaccagcaccgcaagcaaaccggaggacaggga

SEQ ID NO: 764 - RNA, 551 nt, Mus musculus
aagaaaagacaaagcacaccgaaaccaaggagcggggagaacaaaccaaccccaggagaaaagagcaccaagacagggaaacccagcccagagcagagggccccacacaggcccacaagacaaaaagccaagaaaagaaacaaggccaccaaagaagcaaagagaacgagaaaaagaacaagacaggaaaagcacaaagccgaccagcgggggaaacaaacgacaaggaccagaacgaaaaacaacgcacaaaggagaggcgaagaaccggcccacccccacaacagcgccaacaaacggcccacaaaagcagcacaagaggagcagagaccagacgagagaacagagcgaggccgccgggcacaaagcaaacaggcagcaggcaaaaaggaccccggcaaaagaaaaaaagaaaaaaaacaaaaacacaagaaacaacacccgccagcaggggagcgaaaacagagaagacagagacccagacaccagacagccgcgacaagaaggagcgaaccacagaccacgacagcccgaaggcagaaggaagcaac

SEQ ID NO: 765 - RNA, 2633 nt, Mus musculus
ggaggaggaggaggaggaggaaagagaagaagaagaaaagaaaagaagaaaagaaccgaggcaaagacaaacgccccaaagaaccaacacccaaagcaggaagagacaaaaaagccagcaggcgaccgcacaaacacagaccaagaagcaagggggaggaaaggacagcacacccacagcgcacacaaaggaacaggaaaggaaccaagcaggcaggaagcaggagcaaaaagaagacaagagggagacacggcgcccccggcgccagccacaagaacccaagacaccagcccggagaggcccacccacaagaggcccccccgacacaagagaaaagccacagcggaccaggaggcaccaagggaggccccggaaacccagcggcaaggacacaaaaaccagcagacaagaccccacaacccgaacaaagacccccccaccccccacaggaaagggcgaaagggggaagaaaagggaggagaagggcagaaagaagaaacaaagagcaaagcagcccaaccaacagaaaccccaacacacacacccagcgccgaccgccaaggcaacaagcaaccaacagagaccaggagccacaaccacccagcaccacacaaaagaaaccgaaaagagagacacgacacagacaaacaaggagccgggaaaaagcaggcaaagggagaaaacggcagaggagaaaaagacaggagaaggaaaggcagcagagcagacgacccggggggaccccaaggggcgaaacagaacgcagcagaagcaacgacaaacagagcaaaaacacagagaagagcaggaaaagggggggaccacaacagaggaacgaaaaggggcagcagagggaggggagggagggccacggcagagcaggggagagcgcccacccgcgggaaggccgaccggggacacccaaccacaagccccagcgcgggaccgcccaccccgcccacacccggccaaaagcacgaagagggccacccccggaagccaccagcgaaggcaaacccacggcccaccggcaggacagccccgggaccgggggaggagccggacccagagccagcaacccaacgaggaaggcaagaagaagagaaggggaaagaaagccccaagcaaggccaaagggaagaggcggacaggaagaaagggggcagggaagccgggagaagagcagcagggaggggggggggggagggagggggaggagacgaagcagcacaggcagagggccagcgggcggacggcacggcggaccggagcaggacgcagacagaagaggagaagagcccgggaagcgggaggacagaagggaagcagaagacccaaccacccaacggggcagcaccacaacgggggccggaccaaaaaacaagcaagccccaggggggggcaggcacgccaacccagcacgggaggcagaggcaggcagacgagcgaggccagccggcacagagaagccaggacagccagggcacacagagaaacccgaccaaaaaaaaccaaacaaacccaagcaagccaagagccagcagcacccccccccccccccccccccccgcgccccccggcgacgcagcgaaggggccaggccgagcccaccacggcccgaagccaggaaaaacccgcaacaagagcaggagaagcaaccagaaaagcaacaaacagacaccgcgccgggggcgggaaaccacagaccaccccaggcaccgggcaagcagagaggacagccggggcgaacccgacgagcggccaaggaggaaaagaaaggccgaaccaacccccgggccagggacagcagaagagcggaccccgaggccacaagcccaccgggggcaagggccagcagagcggcagcagggggacccaagggcgggggcgcgagccacaggaacgcagggaggagccagagccagaggacgcccaggacggagcggagagcaaggacccccaaacccagaagcccggcagcgccaaggagccccagagaaagacaccaaggcagccgacagacgaagaccaggccaggccccaaaaagaaaacagaaaacccccccccacccgcacagcggccaccaagcccaaaacccggcagaggccaacgccggccaccacacaggcaggaacacacacagcaggcgggaagacaagagacaggaaaaccggccaggaagcacaaagcccagagccaaaagaaagcaggccagcaaaagcaggaaaagcccagaccccaagcaccacaagcagcccagagccagagggacagcgcacagaggccagcagcgagcaagggccagagggccgagagcagggccaagccgccgcaggagacaaacagcgaagggaaaaggcacagaagcaacgaggccagcacccaaacacgagcagaagagacaggcggggcgaggaggacgaggaagaagaacggcggcccaaccgccagcaagaacgaccgcaacaggacccgcacacgagggagagcgagcagaggcaaagagccccaagcccagaacggggcaaaggccaggagaggcggccacaccggaggagcaggaagcaccacccagcagccacacgaggaacccccacgaggaaagcccacgaggaaccaaaacccacggcaa

SEQ ID NO: 766 - RNA, 625 nt, Mus musculus
ggcaagagcaacaccgacacaccggaccaaaaggaccaccacaggaacagcaccaacgacagccaacacaagagcagccagaaggagaagaaaacagaaggcaggcagggggcaaggggcaggcgagagggaggggcaaggagcagagccaagaggccaggaccgaggaaacggagaggagggagccacccgggaaacggggccaagacccggcggaagagggcagcacagagagcaaagcgagagagagccagccagcggaaagacacaggcagagaccgccaggggaaggcaaagcaggaccaccaggaaagccagggggggggggggggccgagaggaaaagcagggaggccgggaggagacaaagcagggcaaagcaccagaagcgcaaggacccccccccccccgccccacccgccccaacggacgaaacacagcacgcagaggagaaggaagcagcacaagagccaggccaggaagggcccgcagcaggggccgagcagggcgacgggggagaaaggcggggaaaaaagaaagccagggacggccagcagcagcgacaagcagaggacgacgaggaaccaggagaaaaacgccaaagacggggaaggcacaaaggagag

SEQ ID NO: 767 - RNA, 1305 nt, Mus musculus
  misc_feature (600)..(699): n is a, c, g, or u
ccaagaccgcgaccgcagagccacaccacaccaacaagaaagaaagagacaaaaaaacaggggcggagagaaagcaccggaagagcacgacgccccagaggccgggcaccagcaccacaaaaagccacaaccacaaacccaggcagggcaccaagcccccgccccacagaacagcacgaagagagcacagaaacacaggcacacgccccacacaaaaaagaaaaccaaaaacaaaaaaaaaaagagagacaaacaacgaagagaaaaggcaaggcacaaccaagaagaagacaaaccaaaccacgaaaaagggaccccgaagcgcgccagacccaaaacccccgaccgacccacgaacacggaaaacaacaacccagaaagcgaaggcggcggagacagaggagacaaacagcagacgagaaaacagcagccgggcggaaaaggccagaccagcaagggcagcacaagagaagcagggccgggggcaccagaaggagcgagcccacggagggccaacagagaaacagcaacaaagccaaaagaaagcccaaggggccagcaaagaggggagggccacagacaagagcacgaagacacggnnnnnnnnnnnnnnnnnnnnnnnnnnnnnnnnnnnnnnnnnnnnnnnnnnnnnnnnnnnnnnnnnnnnnnnnnnnnnnnnnnnnnnnnnnnnnnnnnnnncggcgggcggcggcggcggcggcggcggcggcggcggcggacgggcagcaagacagggacaaggaggccagaagagggggcaaaacccccgagcgaggcaaggggaggcccccgacaggccggcaaaacagggccgcaagagcagcacgcgccaaccaggacccacccccaccccgggagggaaaagacagggcacagccgcgccccacccagaaagccggacaaaggcccccacacccagcccagcagaaagcaaagaaagcagaaagcagacaagaaaacgagccagccgggacccacgcggagccagccggcagaaaccacaacgcgggcagggggagcacgccaacccagcacgggaggcagaggcaggggacgagcaaggccagccgacacaaaggagccaggacagccagggcaacagagaaacccgcgaaaaaaaaaaaaaagaaagaaagaaagaaagaaagaaagaaagaaagaaagaaagaaagaaagaaagaaagagagaaagaaagaaagaaaaagaaaccacagccagcacagcacaggagagaaagcgcgacgccccccaaagggacaacaacccagaggcaaggggggaca

SEQ ID NO: 768 - RNA, 7581 nt, Mus musculus
  misc_feature (2400)..(6778): n is a, c, g, or u
acgggcacccagcaacggcaccgcgaaccaggaaaagcccaggggggaccaggcgccagcccagcgagcaccacaagagccggcacggcgggcgaggccaccggggaccgccccgccaaccacggagacccagcccggcgacggaccacagacggccagaaccccaaaggccagcagagcacagggaccccaagagccccgaggcgggggggggcaggggacgaaaaaaacaacaggagccgccccgcgcagcccagccccaagccccaagcgccgggagagcacagggaacggagcaccagcgagccccagcacagagccaaagcccccacccccccaaagaggaccgccaggggcccagcaaaccccacccggaccaacgcgagcagagcgcgggggcaaacaccaaacccaaagcaaccgacaaggaaggcgcacaccaaaaggcggccagaagcccccaggagggaaccccagaaggagcacagaggaaggaaggagcagaaaccagcaacagagggcccccacaggcgcccaccgccccacagccaggcgcaggcgagcagagaaagagggcacccaagaggaaaccaaaagcgccgcaggcagcagagaagcggcccaggaccaaccccccggaaccaaccccccacacaacagcaacgacgcacacaaaaccgggaccccggcagaggaggcaaagcacccccggcacaaaacccagccgggagagcagaaggaaaacagcaggcccgcaacagccacgggacagcacaggcgcgcccaggggggggggggggcgaggggaaaagaagaaagaacaacgaacaacaggggaagcaaaagggaacaaaaagaaggggggggggggggggggggggggggaaacggcggaaagaaagaaacacacggagcgaacggacaccaggacaccagaaccaacagcaaggcacggggcaccaagacgccggacccagaacggcccaaggcgaaggccccccaaaacaaccacagagagagaagaccaccggcgcaaagagccaagcaaaggaccgagaacaaacccccggcacccaagacaccggaaaaacaagacgcgaccccagagcaggagcaacggaaccacgcccagaccaccgcacagggggcccgcccgcgcaaccccccaccaacaccaccacccggcgagcgcccacagccaccgacgccggaccaccgcagagacgccgccggggaagccaacagagcccccacaggagcgcaacgacaaacccccaagagaacagaaccgaagggcacgcaggcggcaggccccacccacacccacacccaccccagccccacccgcccggggagccgcagggaggcacccccccccgcccccccacccccacccccgccccacgcgcacaccccgggcgcgcacagccccccacacggccgccccgaggccggcccgcacagccccggagccccggacgggcccccggcgcccaggaacgccggggcagggaggggggagcgggcggaaaagcacggggccgcccgcaggacgcggcacccccccagacccagaggggagcacagccccgccagcaccaggaccggcacggcggcagggcaggacggaggcgaccgggcagggcacgcaccgcgggcaaaggccccgaccacaccgccacagggcacaacccccgaaacccgccgcccaaaccgcccggggggcgcggggaaacgggccgcccgcccacaaggcggcccggaagcgaggcgcgggaaccacaccagagcgggccgcagcggacacgcccgcaaaacaagcccacggaaccccccgacccgcaaccgcccccccggccaccaccaccaccaccaccaagaccaccaccagcaccgaccacccgacacccacaagccaaaaaccaaaaaaaaaaacaaaacaaacaaaaacaaaacacagaggggggggcggggcgaggggaggaagaagaaagaagaaccaacccaaaggaagcaaaagggaaaaaaagaaagcgggccgggcggggggaaggaaagaaacgcacaggggcgaagggacgccaggacacgggaaagcgacgggcccagggagcggcgaaggagcagcacgcgacgcaggcccacgaggcaggggggcgggcagcagaggggccagaccaagagcaggcgagaggaggagaggagccggaggcccagagggcagggggacgaggcggaccgggcggcgggaggaaggccgcggagggggcggggcgagcggcagggaagcagggagcgagggagagggccaaggggggggcagagaggcgggccggagggagggggaaaggaagggcagcggcagacagggagagcggaagcgggaagacgcaggggacnnnnnnnnnnnnnnnnnnnnnnnnnnnnnnnnnnnnnnnnnnnnnnnnnnnnnnnnnnnnnnnnnnnnnnnnnnnnnnnnnnnnnnnnnnnnnnnnnnnnnnnnnnnnnnnnnnnnnnnnnnnnnnnnnnnnnnnnnnnnnnnnnnnnnnnnnnnnnnnnnnnnnnnnnnnnnnnnnnnnnnnnnnnnnnnnnnnnnnnnnnnnnnnnnnnnnnnnnnnnnnnnnnnnnnnnnnnnnnnnnnnnnnnnnnnnnnnnnnnnnnnnnnnnnnnnnnnnnnnnnnnnnnnnnnnnnnnnnnnnnnnnnnnnnnnnnnnnnnnnnnnnnnnnnnnnnnnnnnnnnnnnnnnnnnnnnnnnnnnnnnnnnnnnnnnnnnnnnnnnnnnnnnnnnnnnnnnnnnnnnnnnnnnnnnnnnnnnnnnnnnnnnnnnnnnnnnnnnnnnnnnnnnnnnnnnnnnnnnnnnnnnnnnnnnnnnnnnnnnnnnnnnnnnnnnnnnnnnnnnnnnnnnnnnnnnnnnnnnnnnnnnnnnnnnnnnnnnnnnnnnnnnnnnnnnnnnnnnnnnnnnnnnnnnnnnnnnnnnnnnnnnnnnnnnnnnnnnnnnnnnnnnnnnnnnnnnnnnnnnnnnnnnnnnnnnnnnnnnnnnnnnnnnnnnnnnnnnnnnnnnnnnnnnnnnnnnnnnnnnnnnnnnnnnnnnnnnnnnnnnnnnnnnnnnnnnnnnnnnnnnnnnnnnnnnnnnnnnnnnnnnnnnnnnnnnnnnnnnnnnnnnnnnnnnnnnnnnnnnnnnnnnnnnnnnnnnnnnnnnnnnnnnnnnnnnnnnnnnnnnnnnnnnnnnnnnnnnnnnnnnnnnnnnnnnnnnnnnnnnnnnnnnnnnnnnnnnnnnnnnnnnnnnnnnnnnnnnnnnnnnnnnnnnnnnnnnnnnnnnnnnnnnnnnnnnnnnnnnnnnnnnnnnnnnnnnnnnnnnnnnnnnnnnnnnnnnnnnnnnnnnnnnnnnnnnnnnnnnnnnnnnnnnnnnnnnnnnnnnnnnnnnnnnnnnnnnnnnnnnnnnnnnnnnnnnnnnnnnnnnnnnnnnnnnnnnnnnnnnnnnnnnnnnnnnnnnnnnnnnnnnnnnnnnnnnnnnnnnnnnnnnnnnnnnnnnnnnnnnnnnnnnnnnnnnnnnnnnnnnnnnnnnnnnnnnnnnnnnnnnnnnnnnnnnnnnnnnnnnnnnnnnnnnnnnnnnnnnnnnnnnnnnnnnnnnnnnnnnnnnnnnnnnnnnnnnnnnnnnnnnnnnnnnnnnnnnnnnnnnnnnnnnnnnnnnnnnnnnnnnnnnnnnnnnnnnnnnnnnnnnnnnnnnnnnnnnnnnnnnnnnnnnnnnnnnnnnnnnnnnnnnnnnnnnnnnnnnnnnnnnnnnnnnnnnnnnnnnnnnnnnnnnnnnnnnnnnnnnnnnnnnnnnnnnnnnnnnnnnnnnnnnnnnnnnnnnnnnnnnnnnnnnnnnnnnnnnnnnnnnnnnnnnnnnnnnnnnnnnnnnnnnnnnnnnnnnnnnnnnnnnnnnnnnnnnnnnnnnnnnnnnnnnnnnnnnnnnnnnnnnnnnnnnnnnnnnnnnnnnnnnnnnnnnnnnnnnnnnnnnnnnnnnnnnnnnnnnnnnnnnnnnnnnnnnnnnnnnnnnnnnnnnnnnnnnnnnnnnnnnnnnnnnnnnnnnnnnnnnnnnnnnnnnnnnnnnnnnnnnnnnnnnnnnnnnnnnnnnnnnnnnnnnnnnnnnnnnnnnnnnnnnnnnnnnnnnnnnnnnnnnnnnnnnnnnnnnnnnnnnnnnnnnnnnnnnnnnnnnnnnnnnnnnnnnnnnnnnnnnnnnnnnnnnnnnnnnnnnnnnnnnnnnnnnnnnnnnnnnnnnnnnnnnnnnnnnnnnnnnnnnnnnnnnnnnnnnnnnnnnnnnnnnnnnnnnnnnnnnnnnnnnnnnnnnnnnnnnnnnnnnnnnnnnnnnnnnnnnnnnnnnnnnnnnnnnnnnnnnnnnnnnnnnnnnnnnnnnnnnnnnnnnnnnnnnnnnnnnnnnnnnnnnnnnnnnnnnnnnnnnnnnnnnnnnnnnnnnnnnnnnnnnnnnnnnnnnnnnnnnnnnnnnnnnnnnnnnnnnnnnnnnnnnnnnnnnnnnnnnnnnnnnnnnnnnnnnnnnnnnnnnnnnnnnnnnnnnnnnnnnnnnnnnnnnnnnnnnnnnnnnnnnnnnnnnnnnnnnnnnnnnnnnnnnnnnnnnnnnnnnnnnnnnnnnnnnnnnnnnnnnnnnnnnnnnnnnnnnnnnnnnnnnnnnnnnnnnnnnnnnnnnnnnnnnnnnnnnnnnnnnnnnnnnnnnnnnnnnnnnnnnnnnnnnnnnnnnnnnnnnnnnnnnnnnnnnnnnnnnnnnnnnnnnnnnnnnnnnnnnnnnnnnnnnnnnnnnnnnnnnnnnnnnnnnnnnnnnnnnnnnnnnnnnnnnnnnnnnnnnnnnnnnnnnnnnnnnnnnnnnnnnnnnnnnnnnnnnnnnnnnnnnnnnnnnnnnnnnnnnnnnnnnnnnnnnnnnnnnnnnnnnnnnnnnnnnnnnnnnnnnnnnnnnnnnnnnnnnnnnnnnnnnnnnnnnnnnnnnnnnnnnnnnnnnnnnnnnnnnnnnnnnnnnnnnnnnnnnnnnnnnnnnnnnnnnnnnnnnnnnnnnnnnnnnnnnnnnnnnnnnnnnnnnnnnnnnnnnnnnnnnnnnnnnnnnnnnnnnnnnnnnnnnnnnnnnnnnnnnnnnnnnnnnnnnnnnnnnnnnnnnnnnnnnnnnnnnnnnnnnnnnnnnnnnnnnnnnnnnnnnnnnnnnnnnnnnnnnnnnnnnnnnnnnnnnnnnnnnnnnnnnnnnnnnnnnnnnnnnnnnnnnnnnnnnnnnnnnnnnnnnnnnnnnnnnnnnnnnnnnnnnnnnnnnnnnnnnnnnnnnnnnnnnnnnnnnnnnnnnnnnnnnnnnnnnnnnnnnnnnnnnnnnnnnnnnnnnnnnnnnnnnnnnnnnnnnnnnnnnnnnnnnnnnnnnnnnnnnnnnnnnnnnnnnnnnnnnnnnnnnnnnnnnnnnnnnnnnnnnnnnnnnnnnnnnnnnnnnnnnnnnnnnnnnnnnnnnnnnnnnnnnnnnnnnnnnnnnnnnnnnnnnnnnnnnnnnnnnnnnnnnnnnnnnnnnnnnnnnnnnnnnnnnnnnnnnnnnnnnnnnnnnnnnnnnnnnnnnnnnnnnnnnnnnnnnnnnnnnnnnnnnnnnnnnnnnnnnnnnnnnnnnnnnnnnnnnnnnnnnnnnnnnnnnnnnnnnnnnnnnnnnnnnnnnnnnnnnnnnnnnnnnnnnnnnnnnnnnnnnnnnnnnnnnnnnnnnnnnnnnnnnnnnnnnnnnnnnnnnnnnnnnnnnnnnnnnnnnnnnnnnnnnnnnnnnnnnnnnnnnnnnnnnnnnnnnnnnnnnnnnnnnnnnnnnnnnnnnnnnnnnnnnnnnnnnnnnnnnnnnnnnnnnnnnnnnnnnnnnnnnnnnnnnnnnnnnnnnnnnnnnnnnnnnnnnnnnnnnnnnnnnnnnnnnnnnnnnnnnnnnnnnnnnnnnnnnnnnnnnnnnnnnnnnnnnnnnnnnnnnnnnnnnnnnnnnnnnnnnnnnnnnnnnnnnnnnnnnnnnnnnnnnnnnnnnnnnnnnnnnnnnnnnnnnnnnnnnnnnnnnnnnnnnnnnnnnnnnnnnnnnnnnnnnnnnnnnnnnnnnnnnnnnnnnnnnnnnnnnnnnnnnnnnnnnnnnnnnnnnnnnnnnnnnnnnnnnnnnnnnnnnnnnnnnnnnnnnnnnnnnnnnnnnnnnnnnnnnnnnnnnnnnnnnnnnnnnnnnnnnnnnnnnnnnnnnnnnnnnnnnnnnnnnnnnnnnnnnnnnnnnnnnnnnnnnnnnnnnnnnnnnnnnnnnnnnnnnnnnnnnnnnnnnnnnnnnnnnnnnnnnnnnnnnnnnnnnnnnnnnnnnnnnnnnnnnnnnnnnnnnnnnnnnnnnnnnnnnnnnnnnnnnnnnnnnnnnnnnnnnnnnnnnnnnnnnnnnnnnnnnnnnnnnnnnnnnnnnnnnnnnnnnnnnnnnnnnnnnnnnnnnnnnnnnnnnnnnnnnnnnnnnnnnnnnnnnnnnnnnnnnnnnnnnnnnnnnnnnnnnnnnnnnnnnnnnnnnnnnnnnnnnnnnnnnnnnnnnnnnnnnnnnnnnnnnnnnnnnnnnnnnnnnnnnnnnnnnnnnnnnnnnnnnnnnnnnnnnnnnnnnnnnnnnnnnnnnnnnnnnnnnnnnnnnnnnnnnnnnnnnnnnnnnnnnnnnnnnnnnnnnnnnnnnnnnnnnnnnnnnnnnnnnnnnnnnnnnnnnnnnnnnnnnnnnnnnnnnnnnnnnnnnnnnnnnnnnnnnnnnnnnnnnnnnnnnnnnnnnnnnnnnnnnnnnnnnnnngaggaaagggagggaaggggagagggaggggcagggggaggggcagagacagagacagagcagagacagagaaggagggagggggacacacacaaccaacaagggagacagacagacagagaaagaacaacccacacagacgggagcacccaccagagagacagagagacagaggaagagagagacagagaggaagagagacacacgaagaccacagcagaagacagacagagaagagagagggacacacacacacacacacacacacagcacagccagagaagcacaagcgccaacaagaccaggccccagccaagcccgcccccacaggccccaagaccacccgaggcgcacccaggggacacgcacgcgccgccccagcgaaggggagcccggggcaggggaaagggggcgcaccgcgcgggggagggcaggcgagcgcgagcgccccccgcgcggcgcacgggggcggccagagggcgggaaagaacaggagcgaagcaccccagccccgccgggagcaggcgcaggacccagccgccggcaccccaacccagcgcccggcaccacccccagccccaccacacagggcggcccgcacaccaaagacggcagcggagagcacacgggcacccagcaacggcaccgcgaaccaggaaaagcccaggggggaccaggcgccagcccagcgagcaccacaagagccggcacggcgggcgaggcaccggggaccgccccgccaaccacggagacccagcccggcgacggaccacagacggccagaaccccaaaggccagcagag

SEQ ID NO: 769 - RNA, 706 nt, Mus musculus
gcagggggggacacaccgccagaagaacaaaccaggcaggaagcaaggaagggagagcccgccccaccagcacgacagggaccggacgcgcaggggggggagggggcaccaggacgggccgaggagagcgcggagcagaccagggcccacgcacccacacccaaacagggaagggaagcgcccgccgcccgaggagacgaaaggacgcccccgggccagagcgcgcaccaccccgagggcagagaggaagaccagacaccccggcaggggcccgggcaggcaccggagaagggcaccacacgcagccgcagggcggcggcggcggggcgcaggaaagcgcccggagggggaggcaccacagggcaagagaagccacggacacgagacagaaggagaagaaaagagggaaagcgaggaaagaagagagaagcggcaggagaacacaggcacccaggcacccagaagcccagggcagccccagcccaggagcaccggcagggaggcaggaagaagagaagccccaggacaacagccccggccggaaaacgggagggcggggagggcggagggggggaccaggaagagaaggcggcaagggcgaggcggaggccggagcccaccccacggagccaggcccgcaggccggcggccaaggagcaccggccaccaccgccgcccccaccgccccggcccagccgcggggagc

SEQ ID NO: 770 - RNA, 7618 nt, Mus musculus
aaaaaacggaaacgacccagaaacagcgagcggaagacgcgcgcaaccgacaaaagaaaacaacggaaagccagaagcagggcaaggccggcacaacaccgaaagaaaaacaaagagacaccaagaaaaaacagaagccggaaaaagagacagccgaaagacaacacacaacacaacaacaacacccaaacaaaacacaagacaaaacaacaacaacacccaaacaaaacacaagacaaacacacaaaaaacaaacacacaaacaccaccacaccacaccaacacaccacacccaaacagcccccccaaaaccgaggaagagagagaaaaaaagagaccccaaggacagcaaggcagaggaagcagaacacaagacgaggggagggagaagcggccccagccgccccacacaggaaagagcaaaccaagggcagcccagcaacaccacccaaaaaacccgaagggaggcgcacagcaagaacaccaggagcagaggccagccacaaaacaaaccccagcggggacaaaccagaagcggagagccgaggcgccaagacaggaaaaaaaaacaggaaaaagagcaaaacgagaagcagcacagaaccaagcagagcacgaccgagcaaagagcagacgcagggccggagacccaacccccccgaggccccacccagcagaccacgggcacgcccaggcaacccgggaaaagaaccgggcagaagcggaaggagcaagaagccgcagccaaaccacgcccagacggaaaagaaaagacagaggacgaaagacagagagaacaaaaccgacacagccgcaaaggcacaaacagccccacaaaacccgcacaggaaaccagaaaacaacacaaaacacacacggagagacagagaaacaaacaccaaagcacggaaagccccacacagaaagcaaagcggaggaggcccagaacacagcacagagaaagggacccagacccaagccagaaacaccccagcaccgcgaccagccagacccaaacacacagggcaaggaaagaaaagacacagacaggcaaggcccaaaaagccaaccaccaggcaaagaaggcgaggaaaagagaaacacgagcagaccggagcccgacaaggggaaggggggggcggggggcagcaacaaaaaaaagaacaacaaaacaacacacgacaaccaacaaaggagccagcaaaacaagacagcacagaacaaggaaggccgaagggaaacggcggaaaccagaacaaagaacggggcacacagggaaaggaggcgaagcgagacagagaggacgcgaggggaagaaagaacaggccccacagacggaggagaccggccggcaccgcacacagcagacagcgcagacaagaaagagccaccaaagaacccagaaccagggcccgcgccgccaacgggccaaggggagccgaggccagacaaggccagggacggagggggagggacggaccgcggacagggagggcaggaacgaacgcgacaacaaagaagaagcccccaaagaacgccccaaaggaagccaacaccaagcaaccaaaagcccccaacccgcccacccccacccccacccacccaccccccggcccggcgccccgacggggcaacaaaggcggccaagggccccccaggaggccgacaggccacgaacaagcagccagagcaagagcccggggacggagcaagagccaccaaggggcagacccagcccgggcccagcccccagggagcccggaccaccaagcgacggagcaccaccgggcaggccccggcaagccacaagagaagcacacgggcccgaaaaacgcaggagcaagggcagcgggagcgaaggggggacccggcaggcagccacaggccacccaccagccaaacgccgaacccccagggggcccaacaaagaggggcaaggccacaccagccaccgagcaggagcaaagaccaacgggaaccaggggggcaaaccacacaggagacaagggagccggaaggacccaccaggagagcccccaggccaccaggcaggaacaaaacacaaagcgagagacccaggagagaccacacgaccacccggaggggcacgggcccagccggcaaaaaaaggcgcagaacaagggagcaggcccaccagggggcaccggaaagcccaggagaggagcggacccaggagacagccaacgaggaaccgccagacgaccagaggggacaagccgcggcgggagggacaaagaacgcaaacggcacaaccccgccgacccgcccacccggggagggggcaggagggaggcgaagcaaagaacccaaaagaagcggaaaaacaagccaccgcacacagccggaggagcccaccccgggccgcccgaagagggcccccggagcggagcagggaaccgaggcgcgcacagccggaacagacaaggaccaaaaagggagcaaagggcccaacagccgcacgggagggaaagcagccgacacaggcccaggcaagaggacaggagggaagccagggcaggaagggaacgagcgggcaccgaacaggcagggacaccgaccacgggcacaggaaggagagaaggaacacaaggaccaaaaaacgaccaggaccaccacagacgggagaaaaacaggacacaccaccaacaaggaggcacgaacacaagagagagccagcaagccacacaaacgaggggcacgcacacaaaaagaccgaggcagcagccgggagaaggcgagcagcaggcgcagccagccaacaagaaccaaaaccagccccaacccaagccgacccagaaaacccagaaggcaggagcacccaaaaccacacacacagaagcacaccacagaaaagagcaaaccaccagagaccaggccggggcaagacagaccaacgagaccaagaaagaaagacagaaagcaacagcccaaaagaacaaaggagaaaagacacagaccggagccagacgcgcgaaggagcggaaacaggaccggagcaggcaagaagaaacacaaacccggcaaaagacacaaggaagcagcacagaaaagagaagccagacaacgcagagagggccgccagcgaaaaagaagaagaaaccagggcggaaagcaaggggaaaagaagaagaacgaaagaggcaagccagcgagcggggaaccgagggggcgagaacgacacaagaacagcagaagaagaagaagaagaagaaacacagcacagcagagagccccaacaggcacaggaacaggccaagaccccacaaagggcgcacaaagcccccgagggagggggaacacaaaagagccaaaaaacaaagggcaggaaaagcagcccacgaaggcacgcacaccgggagacgcacgggccagaaaagccaagccaaaggcggccgggaaaaggggaaagaaaacaaagcccacagaaacacgggggacgcacagcaggaggaccacccgccccaggcaggcacaggacagagccagccggggggaggccccccagggccccacacgcggacaccacggaggcccgccccagccaggggggccgcacaaccccaaccaagagggggccgggccaccccccaggcgcacgaccagaaaagggcaccgacagagaacaacaacaagcaccgccaaggcaggcacgagaacaaccagcccagaagcagagccaacagggaagagaaagcgagcaggcagagcacaggacgaacgggacaaggcaaacaggcgccacaaggcacacgcaaccaaaaacaaaggagaaacacgccccacagaggaaggaggaggaagaggacagaaggaaacgccgcagcaagaagccaaaccccccccacaccaggcacgaacacggacagccaggggagcagagaaaacccaaaggcgaaacgggggagggcaggcgaggagagaggggagggcagcaagggcaaggaaagaggggaggaagagggcggggggggaggggagggcgggagcagagagagagggaggcagcagcacagcaagcaaggaggggagagggaagagagcaggggagaggcggggaggggcagggacaaggcaagggcagggcggaggagcaagaaagcaggggagggggaggggcggggaagaaggggagggaagggcaaggaaggcagggccgggaaagcgacagggaacagggagcagggaaggggagcagaggagggagcacaccacaccccaagagccacgaacccaggcgcgaccagcacaagccgaccaggagccccagggagccggcccagcgggagacagagagagacccagcaccggcccgaggaaagaaccaggcgacgcagacaaacacccaacaacgagacgcccccagaaacacacacggacgagcagagagaccaaggcagaaaacccccccaaacccaaaaagagccacacagcggcgccagaaggaagcagaaagcacaaagcacagcaaaggcacaaagaagagaagaaggcgggaacccagccagagagcaaccgaagccacgaccagcggcagagcgaaggcaacggagagaaacaggcacccagcagagggagagccagagaccgggaaaggccagccaaaccgaagaagaggcccaagcaggcacccgaaagcaaccggggaggcccgcaggaaagggggggggggggggggggaacaggggaagcaacgaagcccccccagcagcggcaggcacagcacccagaaggacaaggacacccagcagcaggagagggcagccgcaaaagcgacccgcaggaaggagcaccgccaaacacaacgaccccacgaggagaagaaagggcaggaaccaggggaagccagaagagccagcggcgacccagaaaaaaaaaaacaggcccggaaacacccgcacgcccgaggcagcccaggagggaaggaaccacagaggagaagaacgcgccagacgagcagggagggagaaagcagcgaggaggagccccccccaggcggggcgggcggggcgacaaacaccaaggcagccacccagggcagaaccaccagagcccggcccccaggcaaacaggccacgagggcacagagaacccgcgccccgccaggagggcggcgggagcccgcaggaagaaaagggcaagaggccgggcccaagcaggagcaggggaaccagacccacagagaaaagcgcccgagacccggagccacccgccgcacccgagggaaagcagaagaaggaggacaccgaccggaggacacagggccggccgcacaccacaggggggccaggcgcagaaaacaggggccaaggacacaaggcgagggaagccacagagacgcaggaaacaagccgagacacagaaccacacaccagggggaaacaaggaacgaacaaagaagcgaggccagaagcccgccaagcagaggggccaggcacgaagcagagggagaaggcgagaggaaaagagaaacaaaaccacaagaagcgccaacggaaaaccaaaacacaaggcggagggagagagaaaaaagaaaaacagaagcaaacaaaaccccacccgcaagagacccagacaagacccaccacaccacagaaaaggccagggaacaagcaggccagcggggagaagcgaacaacaaagggaaggaccaagcgaaggagcagagcaaccacccggccagaaaggggagggagaaccaggcaaaagccccagagaagagggagagagagagagagagagagagagagagagagagagagagagagagagagagagagaggacaaccacaaggccacaagaagagggccaagcacagagcagaggagcaacgcagcccaccacgagccgggccaagggaaccacaaggcacaacaaagggggaggaaaagcgggagaaagacccccccgaggaaggggaggggcaagggggaaggagaagggggcccgggacaggaggagggagggggcggagggagaaaggaaaaagagacgagcacagaggacacagaaagaagcaagaacgaaacggaaacagagagcaaaagcagagagaaaaggagaaaggacagccgaaacaaaagcagaaaggaaggcaagagacagaaagcaaagaagcaggagggcagacacaaggccaagccagagggaacagccacaggaaagaaaaggaggcacaaagcaaaaaagcagaacggggagaaagacgggaaaaaaaaacaaaaagcacaaaaggagggagccagacaggcagcccaaagaccacaaagaggacaaaaagaaaagaaagaaaaaggaaccacacaaagacaacccgggccaggagcacagaaccaggacacgggaaaacacaaggaaggccccaccagacgcacggaaccacaaaagccaacaagggccaaaaagaagaaagccagagagccgagaggcagaagggaaagcaaagggccaagaaggggagagagcggggaagacgggaacgacccaacacccgagggggaaaggaaggcgggggaaaccgaaacgacggaaagcccacagagagcagcagggcagcacagcagaagaaccaaggaagaaaaagaaaaaagaaagaaacacagggaaagagaaaaagcgaccaagaaagacagcaccaaccagcagaacaaaaccggacaacaaaaaaacagacaaaggaaaacccaaagacaaagcagagcggagagagccagcgaggaaggcagaccgggaccaccggagacagaaagcaaaaaacggaacgaagaaacaggaacaagaaaggcagagagcagaggacaccaggaaacacgggggggaaaaggaaggagcagaggagcgcgacaagcacgggccccaaaacaggcagagagagcgcaaggccgggaacgccccagaacgagaaaaaaggagcagcagccagcagacaaggccagggaagagggaaagaggcagaaagggccaggcgaagagcagaccacaaggcgagagagaaagagacaccagccaagagagggcagggagagaagcagaggccagaaaggggccaagaggcagccagcgggccaagagcagccaagaggagcaagaaaagaaggagagccagaaacggcgggagcagacaacagcaggaggaggcaggccgcaggcgcaaggcaaaaaaaaaaggcgcgaggccacaggaacaaaacaacgaggagcgggagcaaccccggccagggaaaaaaaaaaacacaagcagaaaaaacaagccaaaacagaggggaaaaaagcacaacgcaacaaacaaaaccaaaggaaaggaaaggaaacggaacaaacgaagacgggaacaggagggaaggccaaagcccccccaaaccacgaaacccgagccgaccagaaaagccccagcccaggaccagcgagcccagcgaacaagccaccagcgcaccgcaacccaggggcgggaccagcggcgacgcagggcgggaaacgaggacaggaaacagaaggaacagcaagaggacccaaagccgaaagagaggcaccacggacacaccagcacccacgagaaggcaggccaggcagccggagaaggaacagagaaagaaaaaacgg

SEQ ID NO: 771 - RNA, 735 nt, Mus musculus
agaaggagagagcccaaaaacccaccaacccaaaacaaacacaaggaaggggaagcgaagagagcggcagggggccaaccgaccaccaagcccaaaccaaacgccacacaaaaaccaaaaaaccaagacaggacagagaagagacccacaaaacagcaggaggaacaggcacacagaccacacaaaaaggagcgaacaaacagaagaagaacagaagaagacagagcagaccaaggagaacagcccacaaaaagagaggaaaacaaaacagacaggcaaacaacaagccaacaacacacacaaaacaaaagaaaaagaaaacaaaaaccaggaaaagagcccgaaaacgcacggaaggaaggagggggaggcaaggaaaaccacccccacagaacccaacacccaagaggagaagacacacagcaggaaggaaggaggggaagaagggagaaaggggcgagaggaaggacagcacaagagagaaagaccgggaaccaaaacaccgaaaacaaaaaaaacagaaaaaaaaagcgccgggggggaggaagggaggcagggggaagagaagaaggggggacgcccagacaacccagcaacgagaacaccccacccggggcacgccaacaagcacccggcgcaggagcgcaaaaagaaagcccggaagaaacaaagacagaaccgcccaaaggcaaacacagccacaaaaagagaccagacgcacaacaaaaaagagca

SEQ ID NO: 772 - RNA, 825 nt, Mus musculus
acaggagagaagaggagaccgggcgccacacaaggcgggagagggaccccagggggcaggcggacaaaccagaagacgaaccaaaaagccccgcagaagcagacaagggagcggggcaggaaacagccgggcaaggggggaaaaaaaaaaggcccaagcgggcagccccccaagcagggaggccagcccgggcaccaggaaaagcaccaggcgggcagagcggccaaaagaaaacagaaacggaaagaaccaagacccggcggggcaccgaacaggacggcaccgggagaacagacaagccccaaaagcgcggaggcccagggaaagacaagaacagaaacaccagccagcaagaaaaagaagccgcccgccgcccccccccgccagagaagcaggagcacaagaccacgcaacggcgggagaaaggcagaacagaggcgccgaggaaccccccagccaaacaaacagagacgcaacaaaacaaggcacgaaaggggggcagcggcgagggacgagccacaaagacacccaggggaggagaagaacaaaaggccagcgaaacgcggagaagggcacggaagacacaaagcagagagggacgcgggaagagaaaaggagaggggagggggcaagcagcaaaggaaaaaggaggagccggaaaagcaggggaagacaccgagccagagaccagagaagaagggagcaagaccagcacccacagacacaaggcaccagggggggaccaccaaaaaaaaaagaaaaaaaagcgggcaggggggcaaaccaacccagcacagaggcagaggcaggcggacgaggaggcca

SEQ ID NO: 773 - RNA, 2092 nt, Mus musculus
gagacccaacccagaaggccacaggaagcccggacgccagagccccccacggcgagaaagaccgcagccagcaccccgagcaagccgggggcaggagacagaccgagcaagggccgccaccggagcccagagaggcgcacccaggagccagggcagcccaggggaagcagaaaggcaagcaaggagaaggccggcagccaggacggaccccacagaccgccaggacacgcggcagccacaaaccgaggaccacaaaacaaccgaaaagacaggggaagaggcaacccaaacaaaaacaggcccccacaacgacaccagcaaccccccgaaaccaccacccgcgagagccgaggggaaacacaaaccagaacagggcaggaccaaagggcccaggaggcagccacccagacacccggaaaaaaaagagaaggcaaaacaccagaccagcagaggagaaaacacaggcagcgccagcaagcccaccacacgggccccacagaagggcgccgaaaggagaacccagcccacggcccacggcaaacggcccaagaccgggaaacagcaagcacaagggaggaagaacagccagccccaggaagggagggaaaggagagcggagggggcccccagggcaggggcgcgccagcagcagcagcggaaggcagagcgccacagagaagaggcagagggaaccaacaaacggggggaggagaaggaccacaacaaaaaagacaaaagggcaaagaacaacaagaaaaaaagggagccacagggcccccccccagacaccgaacccccgggcacgcaggccaaggaggcgagggggacaacaagacaagggaagcccagcggccgaaccacccaacccaaaagaaggaagaggcaggagagaggccaggcggcagggcggggcagcaggccagccgggaaccacgccgcgcagcaccacagaaagaggaaaagaccaacacaaaaaaaagaaggacaacagaaaaaggcaccaaaacgaagaacgcgaccagagccaggggaacacaggaacacagcgcacccaggcaggcagagccaaacgaaaccggaaacggggagcacgaacgcaccacaccaagaacggaacaggagagggcacaaccaccagcacaaaccaagcaggcggcacaaacaaaccaacccagcagaagccaggcaggcccacaggggaggacccccgagagaagcaaaagaaaaccaggacgaggcgggaaagcaggaccaaacaggggcaagaggccaaaaggacaaacaggacagcgggacccgcggcgcaggacaagggacgacgagagcaaaaccacccggggcccgcgccaccccaacagagaacagccggagcacgaaggggagccgccacaaaccacccggcgaagaaccacacagcaagaaaacaaaaaacaaaaacccgacccgaagaaaggagcccaccaaaaagaggcccggcagcagggaaaccacacagaaaaccacaacgggcaaaaacagggaccacgagggggccagccccagggaacaccgcaagcaaccggcaaggccaagggacaagaagagggagcaggaagaaagagccagaggacaggaagcgccaagaccggcccgagagacaggaaacgccacagagggccaaaaagaccgaaaccaacaccaccaaggacagcacgggaagggggcaacgcaagggccccacaaaacagagagcacagggaacaaagagcagagagggggaaagcccaaagggagggcccgggcaaaccaaggcagcccgaaaaggcaacaaacaacacagggagaagagcacaaagagcaaaaaaccagaaaacagaagagaccaggagaagagggcccagggaggagggggggaggcagaaagagagagaggaaacacaaacaaagacaaagccagcaagacaaggcggcagacaccaaggaacaacaaagaggggccagagggccggcgagaaaaaccccaaagcagggagaaggaagggacaccacaacccaagcccacccacacgagggaagcagggcaggaacccaggcaggaaccggaggcaggaac

SEQ ID NO: 774 - RNA, 651 nt, Mus musculus
gcgggcccccgcgagagccagcgaggccggcgccgcagggcaccgggcaaccgaccaccgaacggccgcgggacggaaggcgagggacgaggccccgccgcaaaccgagaacgagcgcggccagacaacacagggggaagcccaaagaaccccaagcaggccaccccccgacccccacacccagggggggggcaaagcaaagaaccacaaaaaaaagggaggggcgggagagccaggggaagagcacgacgccccaaaggccgagcaaacccagcaaccacaggggccacaaccaccgaggagaagacacccccggggcaaagacagcacaggacacaaagaaaaaaaaacgggggaaaaaaagggaaaaaagaagaacaccacacaggagcggagagagaccaagaggacgaccgccaaaaacagacccagcaaaaggggcggggcgcgcagagaggcgaagggaagagcagcagcccccagaggaccgaaggacccagcacccaggcaggcggcacaaccacgaacaagccagaaacaacacaccggacccggccccacaaaagccaagcaaaaaaagacaagaaccaggcaaagggcacaccaacccagcacggaaggagaggcagaggcaggaggaccggaaaaagg

SEQ ID NO: 775 - RNA, 1596 nt, Mus musculus
cagagcagccagccagacgaagcagcgccaagccccacaccggacaaacaggcaggaggcaaagggaggcagcccggcgcccccccacagacagccagcagaagcaggggccgcagggaaaaccacgggaagggaccccagaggcccgcggcagcacagcgggaggggggggggcaaagaaaaaaaaaaaaaaaagcgagacaacagaaagaaagggaaaacacagaagggcagaacgcccagacaaagcaagcaaagggggaacagaaaggcgagaaggggcaaggaaaaagggacagaaaaaaaagaaggagcggagggaggccagggacccgcagaggccccaaaacccacagcagccacaaacacggcaccagcaggggaggacacgccccgacccgggaccagggcaaggggcccagacaaagcaaacaaaacaaacgcaaagaaaacaaaaaaaaggggacaaggagccagcagacggaaggaaggaggcccggaaggacggagaagagcccaggggaagcggagaaggcgacggcggagacggaacaagaggagaggacagagggagaggggagggggcacaccagcacggggaaccacccgcagaggaaggagcgccacagaagaagaaggagggcaggggaaggaacgagaccaacgggcagcacaccaagaaagagaagccgggagggaagcaccggaaaagagaaaaggaggcggagagaggccagggaaagagcaccgacgccccagaggccgagcaagccccgccaccacaggagcagcacgcaaggggcgacgccccgcgggcgacgacagcgacaacaaccaaacaaaaaaaaagaaaaccaaaagaacagaagagagagacggcggggagaggaggggagcgcaggcccaaacgcagcccaccgaggcgggacgacccacaggcacgaaccgaagaagaaccagcccaccgggccccaagcagaaaaagaccccacaacaaacccaaccaacagcaaccaaccaacaacccagacccgggggccagcaaaccccgaaaagccccagaagccaaaggcaaacaacgcagaaacacgcagcggcaagacagcccgcagcacagagacaaacgggacgcgaagacagcgaagcagccccaaccgacccaggaaagaagaaaacacaaaccggcaaagaagccaaaaccaaaagcacgcacaacccgcaaagaacgaaacgcccccacacacccggcgcaccacaggacgccgcgggagagggaagagcaccagggaaaagaaccaaagcacaagaccacgccagggacccacgcccagccaggagcacacaggcaaaccggaaaaaggggcacgagccggacagcaggggcacaccaacccagcaccgggaagcagagacaggggacgagcaaagccagccgacacagagaagccaggaaaccagggcacacagagaaacccgccgaagaaaaaaaagggggggggcacggggcaagaaagagcacaaggaagagaaaaaacgacaaggccagcaccgcagccacagccaaggcagcaggcaagccaccgggacacccccaca

SEQ ID NO: 776 - RNA, 2252 nt, Mus musculus
cagggcaggaaggcagacacgaggaagacagcccggaagcagcccagggccagaaaaccagggggccggaacccaaacaaacacggaacagagacagaaaagagcccaacccgaaaaagcaccccagcgaagaagcagaaaagcaaagaggcaaaaaagcagaagagaagaaaagcgcaggaaagaaaacaaaaccggcaaccaagaaagccagccgggaaagacggcggggcacgaccaaaacagaacggggagggggggcccagggcaaggacaaccgcaggaaggcgcccccacaccgaaggcagggaccacagggcaggccggggcaggccccgcagccagagagcacaaccaggaaacacccgacaccacgccaccgcgcacagcccggccagaacacagccagggagaccaagcggccagggccagggccagagagaaagaacggggcgagggaaacggagacagagaccaaccagcggagggagggaagagcaagaacagccgccaaagaaacaagcacaggcccaagacaacgacggagaaagcagacgacccggacagcggagagcacggacaaggcgcaaagccgagaccggggagaaaggaccaaaccgacacggagggaaggaagaggggccagcccgagcaaggcagagaccaacaaaaaaaaaaaagagaagcggcagcccccacaagaagcggaccccacagcaacaggaagggcacaggcaaaacagcacgagagacagggagcggaagagcaccagacggggaaaagccccagcacacaagaggcggcaggagagggggcaaaggcacaccaggacccgaagaaaaaacagaccaaaacaacacaaaccagcaaacaaccacaaaacacacaaaacgcacgacaaacaaggacacggggccagagaggaacgcaaaagcagaaggaggagaggcgggccccacccccaagaagcccaacccaagcaaagggcgaccaaaagacccgcggagacacaagacccagaaagcaaacgagaggaaggacacaacagcaaaaaagacccgcggaggaacacggcagaaaaacagggaggaagggacacaggcagaggggagccagccgcagggacagagcccagggaagcagaagcaaccaagcaagacggaagcacaagacacagagaccccgcggaacggagcgggccagggaacggggcgacaaggggcgagcacgcagaacagagggcgcacacaaccacgcagcgaagcccaagcagacagccgaacagcaccagacgagcaggcgggcgacggaagaggcaaccgagcgccagaacacaaacaaccacgcagaagcaggccaggacccagaagacggagggacaccaggacaagggcgccaccccagcggcccgcccgcccaccaggccccagcggccccgcacacaccagcaccgggaacagaaggacccgaccgcccacccaccagaccaggcagagaaaaagccccccggacggcaagccagcacgcgacaggccaaaggaaaacagaacggggcagggagacaggggcagcagcaagcccacgaggaccccaggaaccccaggcccacagaaaggccgaaccccagacggggagggacgggcgaggccaggcagccagccagcagcaagcaggaaccagaaccgcaaaaagaggggaagcaagacacaaccaagacaaagggaaagaagagaaaagcaggcaaagaagccaaaaaagacaagagcaggggcggagagaggagggaggaacacgacgcaccagagaacccaggccggcccagccccccacaagcggccacaacgaccccagcccggagcaagccccggcgaggcaacacacagaacaggcacaaagcacacaggcaacgaacacgagaaaaccagaaaaagaaagaccaaccaagagccacaaaaagacagaagcggagaacaggcagagcaaggagaagcccccacaaaaaaacgagccaagcggggggggcacacaccgaagccagcacgggaaaggggagggacaggagcagggcaccgcagagaagcgggcgccggacgcagagacagcaaaaaaaaaaaagaaagaccggaggaaggaagcacaaagaaccccagcagaacacagggaaagaccaggacacaggcaccccaacacccagaccggcccgcgaagagggcgcagagaaggcgcagggagccccccgagaaccaggagc

SEQ ID NO: 777 - RNA, 1209 nt, Mus musculus
gacgaggcagccggaccggacagcaacggagggaccgaacggggcaggcgagcacggccccaagacagcgaaaccgaaccacccggcccggcagcgcgcacgcacagcgcccggaaggggcggggcgagaccacgcagcgggccccgcccccgggccgcgcgcacggagcgcgccgcccgccgcaaagccgagggcagggcggcgagggaggcggcggggcgcaacgggccgggggggcccacggacccggaggcggcagccagggggggcccccaggacggggggccggagcacggagggaggcgggcggaggggggaagggcccccgcgacgaggagggggcagagggaggcggcaagcccggcccgggagcggggccaggcacggaaggacgcacaaggcccacagccggacacgggacccccaggaggggcgccaggcacgagggaggcggggggggcccccgggcacgagggcacccgggggcagcggcagagcccggggcagcgagcccgacggggacagcccgcacgcaggccagagcgagcagcagagagggggcacgggcggggccacaccccaaccgaagcaagcagaaagccccggggggaaacacagagcaagaggaggggggaagaaaacggaagagcgagagaaacgggggcgacccgcgaccagcgaggagacccggcccggggcacaaggggcccgaccgaccccgcgaaccaagaggccgcagcggaggagggaggaggacagcgcaccagagaaccgggcaaggaggggagaggaaaggaagacacgcgcacagccaacgaagacaggggggcacgacccccaccccccccaccacagaggagaccagagaggggggcgagagccaaagggggacaggaaccagaaaaagagggaagaaagaagccaggcaccgaaaaggcaccgcagcccgcacagaaaggagcgcgacacacagagggccagcacaggaccgcacgaggagggagcccaggcacaggggccgaaagcgaaaagaagcccggccaggagggaaacgaaggaagaaaaagggcaagggaggccagccccaacccccaccccacaaaagaaaggaacgggagaaggacaagaagagagaacggggccggcaccaaaaaaaaacaaccccgagcaagcaaacaggaggcaaacaagaacagcccgaaaccacc

SEQ ID NO: 778 - RNA, 764 nt, Mus musculus
ggaagggcgcccacacaacgcgggcaaaacacagcaaagagggcagggccagaccagcaaaacaggaggggcacagaaccgaaaaaccaccggaagccaggaaccggcagaaaggcacagagggaaagaagacaggccgcgaccaccgaaaaaccccagaccacagaggaagcagaccaacagcccaagaaaggaagaggacgggccaacggcagggcaagcccgagaagcaagggagaggcggggagacagggccagcagccaggccaccagaacgcccgccccgggggacaaagggggccaccgcagggaagggaggaccgggaggggcgccaagcccggccgccaaagacacgagcccaaacggcgcgccagccgggggacagaggagagagcccagaaggacccaaacgaaggcggcagggaaacggccaggcaccacagaaaagggaaacaccggcagagcaccagcacgcaaccagaacacgagaaagagcgcaaggcagccgccagcccaagcaaggcgagcaccaccaacgaggcaaaccaaagcacaggcccgggaacaagaaaggcagcccggccgggcgaggggcagaggcaggggacgagcgaggccagccggcacagaggagaccagggcagccagggccagagaaaccgcaggaaaaacaaacaaacaaacaaacaaacaaaacaaacaaaaaacaaacaacacaaaagaaaggcaacccgcccggcagggcagcacaacacaggcacag

SEQ ID NO: 779 - RNA, 5880 nt, Mus musculus
  misc_feature (4602)..(4701): n is a, c, g, or u
accaaccacccaaggaacgaacagcaaacagccaggaaaaaaaaggggaacagaagagcccaaaaaaacgaaaacaggagaacccaggcaaaaaaacacgacccacccgagacagggccgaagcccggcgccggagccacgagaacaggcggcccgaaccagaaaccgccgcccgcccccgaggcgggaaaagggggccaccacgcccggcggaccacaaacaaaagaaacaaacaaaacacgagcgcccgaacaccagaagagggcgcagaccaacagaggggagccaccaggggcgagagaaccaggacccagaagaacagcgggccaaccacgagccaccccagccggaccaaaaaggaggaggaaaggcgggcccgcccccagacaacaagaaaggggaaagcaaaccacagagagacccccggccaaacaagagcacacgcagcgggaacggacggaagcaacaagaagacggcagcagcacgagggagaggaacagagaaaaacccccccacaaggcacacacacacgcagaaaacaaacgcggaagggagagagggcgggcagagagagaaaaggaaaaaaaaacaaaaggggggggaggccaagagggaaaagagggaacggcccaacaagcccagccgacagagcccaccgaacaacgcgacgcagacacaacagcgcgcgagcagggccaagagagaaaagaaacacgcaagaaaagcccagccaaagccgaaagggggacccgcagacagcagcaaacacccaaacacgcgcacggcggcagaggcagcaccccgcgcgcaaaacgaacccacagcgggagaccggaaacacccacagaccaacacgcgaagagaacaagcacaaaagaaaaaaagcgggacaaaccacccgaacaagacagaaaaaaccagaaaaaccaaaggcccaccccagaagcacaaaaaaaccagcaaaggacaacgagcagaaaggagcccaagggaaaggcaaaggaacaccacagagcaccccaggaacacccaaccaacgcccgaagggcacccggaaaaaaagaaaagaaaaaaccgcccagcccgaagagagagccaacgagacaaaaggaaaaacaaagggaggcagcacggaaccggcggaaaggcaacgaaagagcacaaagcggagaaagagccaaacaagggaacacgaaaggaggcaacagcaccagggaaaccaccgaaaaagagaaaaaccgaaaaccaaaaagggcacacagaagcaaaaaagacagaaaaacaggaaaagacaggaaaccaagagcacaccagaacgacagagggggggggcaggcagggagggggagcggggagggaagcacgaaagaaaggcggacgaagacaagaaagaacagggcgaacaggggagagccggcaagcagcagaggccgggacaagccagcagcaaacccaggcagagacacacacgaaccagcaccgaaggcagaggcaaggggagagagcaagcaccagaacaaggaagcaaggcagccgcacaaaaggagcaggacggaccgaaaacccagggagcacggacgaaggccaggcgaggcagcaggggaccaaagggccccaagaccacggcagaaaggaagaccccaaggcccaaccagacgcaccagcaaacaaacccaacaacaaaagaaaacaacacacaacaaaaaaaaaacaagccagaagaggcaccacgaaggggccggaaacggccaaagccaaagaaaaggaaaaaccggcccaaacaccaaaggaccacagagaaagaacaacaaaagcaaagccgaacacaaaaaaaaaaaccaaccaggaagcacgcgagcaaaaagaaagggcgaaaagacgcaacaaggaagaagggaagagccaaaagaaagaaagcagcaaggcacaaacaacaggggacagagggggggagcggcaggacaaaggcccccaccaaacacggaaaccaacccagcaccagaagagaccagggaacaggaaaaagaggaaaaagaggcaggcaaaccaaccagccaacagggcaaagacagaagaaagagaggcaggagaaccgccgcgaagaaaccaccgggaaccggaccacagacccccgagaaggagagaaaagcggagccccaaggccaggggcgacgacaaccccgcaaacggaacaaaagggaacccagagcgaagaaaaacagggcacggccaacgacagagcacgagggcgaacaccaagcgcggcacaaaacaagacaaaccggaaggagaagcccacgccgcccgcggaagccacacaaacacacagacaccaaaaaagggggaaaccccaacgagccagaagaaaaaggaggggaccgacacgacacgaacgcgccgccccgcccccgcaaccccagcccagaaaagcccccgcacaaggcagcgcaacaaccccccggaaagccccaaacccacacccagcagggcaacggcgccccagaaacgacccaccagagcggcgggaaaccaaccacccaagagacaagaaccccccaccaacccaccaacccaagaggccaagaacaaccagccaagaaaaaaccggcaaaggaggaggggagaggccagaagagccagcaaacccagcaaaaaagcaaagggcaggacaggggcaacaagagagaacaaaagccaagaaaagaaagccccgacccagaagagcaaaacgagggaacgaaacaaccaacaaaccagacaaaacacgcacaaacacgacaacagagggggaagccgcgaccgcagcggaacaagcgccagaacaggcaggaggaaggaaagaaaaggccagacaccaagagcaggaaagaccgcaaacagaaggcaagccaaggacacacgggggcacgacaaaggcacggaaggcaggggccaaagaacggacaagaagaagaagggccagccagggggcgacgccaacccagcacgggggcagaggcaggaggacgagcgaggccagcggcacagaggagccaggacagccagggcacacagagaaacccgccgaaaaacccaaaaaaaaaaaaaaaaaaagaagagggcacggccccgcgcacagccagcagaagggcccaagagggaccggccccggaagaaaacaacaaacagggcaaaggagaccaagaagcgagaggcagagccaagcacgcacaaaccgccaggaggagcacaagaagaagcaaccggagccgcaacccagagcccaagaaggccagagaggggaagaccaacgcaaagaaagggggaaagaagaaggcaaaggcgacaaggccgagaaagagaaaaaaaaaccacacccccgaaaggggagaccaaaaagaagcaaggaccccaagcacccaagaggccccagccccgcgcgaaacgagaccggcaccaggcaaagaaacaggagagagggaacaacacgcagcagagacaagcagcccagagaagaaggcgccaagcgaaggagaagacgagaaggaagcgccacagagcaaaggaaaaccgagcagcgaaaaagggggggcaaggcgaaaagagcaagaaaaagaaggaagaggaagagagaagaggagaaaaggagagaagaggaggaagacaaagagaagaagagagagagacgaggaaagggccagcgcagcccgcaaaagcaaaccaacgcaaccccgacacaaccacccaaagaaaaaagaaagaaggcggaagaagaaacgacaggccgaagaacacacaccgaaggcagaagcccgccggggacaaagccacaacgccggacagcggggggaaagcaggaaaaaagcaggcggggacagcacaaaagaaaggggacagaggggcggcaccaggccgagcagaacagagaaaggcgaacgaaccgaaggaaaaaaaagcagcgggacagaagccacgaaacaaaaaaaaaagaagaagagaaaaagaggaggaggaggaagaggaggaaagggaggagaagaagaggaggaggaaagaaacgggcaaagggaggaaggaacagagaagaaaaacaggcagaggaggccccacagagagagggcgggccccagacagggaaccaagaaaggccccagaagcacaagaaaaaggccaaagggggcgaaacacacacacacaagggaaaaaacaagcaaacaagcagagaagaaacacccgaccaggaaaaaagcccggggcaagaaaggaagggcggagagaggccagcagaagagcagacgcccgaaagccgagcaaacccagcaaccacaggggccacaaacacgaagagacgacaccccggggcgaagacagcacaagacacaaaaaaaaaaaaacgggccagaggagcagggccgaacaaccagcagacacagaggccacaaccacacagacagaaccaacacaaaaaaaaaaaaaaaaaaaaaagaaaggaaaagcaaaaggaggaagcagagaaaaggcgaaagaggagcagggggggaaaaaaaaagggcaaaaagccaaaaaggcaagaaaaccgagcaaacagccacagaagaccaagcaccgaaaaaaaaacaannnnnnnnnnnnnnnnnnnnnnnnnnnnnnnnnnnnnnnnnnnnnnnnnnnnnnnnnnnnnnnnnnnnnnnnnnnnnnnnnnnnnnnnnnnnnnnnnnnngccaagacaagggcaagagagccgagccaacagccagaagaagacaggcacggggagaagcaacaaaacaaggcgaaaaagagagaagaaacacaaaaaggcagagggaaaaaaagcaacgagaaaagaacccaaacaaaaccccagccggcgggggcgcagagcgccaagggcccagaaacaaaggcagccaaagcggcaaacccgaggcaggaagccagggcaaagacaaagaacaaaggagagacacgagcgacagaggggagccacagcgggcgggaagaacgcaggacccgccaccggccccacgcccagcccaaagaaagaagaagacacgagcgccagacacaccaaagaggacacagacacaggaggggagccaccaggggcgggaaaaccaggacggaagagcagcgggccaaccacgagccaccaccaaccccaaagacaaaagccacaggggaaaaggaaaaagaacaaccggaagaagaagaaaaaaaaaaaaagcggcgggcaggggggcacacgcccaaccagcacgggaggcagagcgagcgaggccggccggcacagaggagccaggaagccagggcacacagagaaacccgcgaaaaacaaaaagaaccaaaacaaaaacaacaacaacaaaaaaaaccaaccaaccaaccaaacaaacaaaaaacccgcaccagccaaaaccaagacagcaccaaacaagacagaacaaagacaaccaggaaagaagggcagccaacacaacacaggaccgcaggacagaaaagcgcagacaccacggacgagaagcagaagaggagagaaacaaaggcaacacaaaagggagcagacaggaggaccagcagcaagccaaaacacggaaagaaaggcgggaggggagggagacggagggggggacacgggggggagggacaagcgagggggggggagaaaaaaccagaaaccagcaaacacgagcaagaggacagagccaagccaggagaggagagggggagacagcggagccggcgccggaacgccgagaccaggcccgagagcggggaagggagaaaccccaccaccacaccaccaccacacccagcaagaagggaagagggaggaagcgaagcccacacaaaaagagagagcccaggagagggccagaaaccaagacaaggcacgacg

SEQ ID NO: 780 - RNA, 1195 nt, Mus musculus
cagaaacagacagccaacagagcaggggagggacaggcgcgccagaaggcagaaagcaaaagcaacaaccaagccaaaaccggccaccagggccaaccagcaaaagcgccccccccaagagaaagcaggagacacgccgcgcgccaggcaacagaagaggacacagacccaacagaggagagccaccagagggcggaaagaaccaggaccggaagaacagcaggccaagcacgagccacccgagcccgccaagaaacccgagagggccacacgagagcgggccggaacgcgaaaacaggcgacccgaacacagagaccaccgcccgcccacgcaacgaggacggaaaaagacacacgcgcgaaggacaccacaagacaagcaggagaggccccaaaagggaacaggaccaccacaggaggagaccagaaaaacaaaaaggggaaaagcagccagggaggcaaccagccggcaccagagcaccgccgcgacacgcccccacaaagagaagggagcgaagcagaaaaaaagcccaaggccccagacgcaggagagaaagcaagaaaaaaaggacggagaagaagcagggcacacgggccaaccgaccagaggaacgaagaaagggagcacaaaaagccccaagggcccaggcacgagccacaacagccagcgacgggaggcaaagccagaagcgaaggaggggaaaggaagacggggggggcgaagagaaggacaacgaaacggacaaggcgcaaaacgggaagagaacgacaaaaagccccgggacagagacaaaagaaagggaagacaaaaaagggaggaaagcagcagcccagcaccaggcgagcacagcaaggaaaaaaggaaaggaagcaaaaaagcaagaagaaagcgaagaggcaaaaggagccaaggacaaaggagcgccaagacaacagagccaccaaaaagaagccaaggacacgaaggaaaggaaagaaccgaggacacaggaccaggaacggcggaagcgggaggggaaacaacgacaaacaacaacaaccaaccacaagagggccgaaaaaaccggcagaggcacaggggcgcagagccagaaggcacgaaacggcgcacaggcagcggagcagccaggcgcgggaaggaacagggaccgggaaagcaaccaggcaaaaccacgagccaccccagccggggcac

SEQ ID NO: 781 - RNA, 8844 nt, Mus musculus
caagcccaggacccaaaccaaaaagccgggaggccaaaccggacagacccgccaccaagcgcgggagcagcgccccccacaccggccaaaggaaaaccgaaaagcccacgaagacgcgcggggggcagagacaaagcaggccgaagcaacagaggaccgagaccaaggggccccgggcaaggcagcgggaaaccaggcggagaagcagcaaacagggggagcagcaaaggaagaagaaggggcaaggcgcccagacagccccaagccggccggcaccgggccgcaggggggggaaaaaaacgcggccacccaaaaacgcaacaagcaaagacagaaggccaagcaagccagaaaaagcgcgggcaggcgacccgagaagaccgacacgcccgcccacacagagcgaaagaaaacacgagagccgcggaaggaaagagggagagagagcagccagaaaccggaggaaaaggcaaacacacagaagaaacgaacaaaccccagaaaagacaacagccccccaccacaccacccccccccccccccaccaacacagccgcgaacagggcgaccgggcggccgggcacagccccgcaagaaagaacaaggcaacaagaaacaaaaacagggagccaaaacgaaaacacggagcaggaaagagaaaacccgaagcaagacgaaaaccgcaaacaagcccacaggcgaccaaagaggagcagagcaaaaacagcgcaaaaaagagggaggcagcaacccacaaaaggcagcaggcaggagcaagcccacaaaaacgaaaagaaacaggcccagacaccaagaaaggcagaggaaccaaacccacacgaagccagcaagcaaggacagagccggacaaggaaacacgcggcgggcggaagccagaaagccaggggcagacagaagacggacggcccccacggcacgcccaggcgaggggcaggcaacaagcgccgccagggacggagcagaagagggcgggaacagcgccccggggaagcgcggcaacggagagcgaacacgggaacggcagccacaaccaacgaaagcccccggaagaaaggagagcgccggccgcaggcagaaagggggaaaaggcagggggagccgaaagaaccccccgcccgcagcccaaaaaggggcgaacccagacaacgcagaccggcagcccaaaccgggaaccgcccaaccccagggcggagaagacacgcacacacgcaacagaagaacaggcgcaggacaggccccaagaccgccggaacaacgaacggccacgccagccccagccaaccccaggggagccggggacggggggaaggaccacacaagaccaaggaaagcaacgcagggaaaaaccagccagaccaaaccgcccaggcgaaacggcaggccggaaaccccagacgagagcccaccacccgcaggcaccaacgggaacggaacacccaaggacacaacaaaagagaaaagcgaacaaccaggaggcagagcacagcgggaaaacccaacacacacccaccaagacgccagccaggggcagaaggaaggacggagcggaagccaggcaaaccaggggacgaacgcagggccagcagcgacaccccgcaccccgcaggagccagggcccagagcccggggagaacacaggacagcgagcgaggaggcaggccacagaacccaggagcaaccccgcagacaaagcccccagaggaagccgcccagcccaaccaaaaagcagcacaccccaagaccgaaggccgaaaggaaacagcgaaaaagcacgccagcacagaaagcaggcaaaaaagagcaaaagagagcccacaaggaagggaaccggcaaggggaaacaagcggaccagaaagcacgaaaaagcccacgaaagaagcccaaacacaggggcaaagagaggaggcccccccccccaacggcgggcgggcaccaaaagggcgggcggaagaacagagcaccaggcggcggagccaccgggacagcgccaagccaggacaacgccccccgaccccagaaacccacccacacccagccgacacagccaagcccccacaccgccgcaaaagggcagcaaacaggggggagaacacacacaaacgccaaacacggaccaaggagcaagagcccggacagacaggggggaaggaaagggacaaaggccaacagcaaaagcaaaaaaagcagacacacaaaaaagccgagccggaaaagagcagagacgcccaaggcacacagacgagccgggccgagcccggcggcgccccgccgcgccgccggacgggaaggacagcagccgaggccgcgcgaaggaaccgacacagcccccagcccgcccaaaaccaccacagcacaggaggcaggcagggggaccaagcagccacggcccaaacacaaaggcacaaaggaacgccccggccaggaagaagaagcaaccaaaggccgaggcaacccaaggaggggacgccacacgagcgagggcccaccgagcggggcgagacggaacccacgccagggggagcagggaaccaggaagccacgggcgggggacgcccacgaccagagaagggacgcagaggcagggggccccgggagggagcccgaagagagcaagcacccgccgccgccccgccccaccacaggagaccaccagggagcacgaagaccccagagggccagacgacagaacccagcccagaacgaaggagaaaaccagaggcacaccgagacaaaacagcacaaagcaggcagagcaccacaacccggcccacagacagggagaagcccaccaccacagacccggaacagacgacagaaggaccaccccaacacgcccaccaagaagccggggcacaagggacaggaaaggacaccaaaaaccaaaccaggcaaaacacaagaaccgaaacacaagagagcgcgcacaagaacacagaaccagcacagcacagggccggcccgccaaggagcagggaaacacgaacaagccaacccggcccagccagcgagaagagagagaaggaacaggaagacccgaggggagccggaagccaaagccgacgcacgcagaagacaggacccacacccagaaaacaacccagaccgaaaaaggaaacgaggcaccccccggccaggggcccgcacggggggggaaaaacaaagaccggagcagagccccagcaaccgcggccgacgagaacgccaaccgcaaaaggccggagagccgcagcgcgcaccgcaagaccacccccagacccgggcaagaagacagaacacggaacaaaaaaagacaccaaaaaaaaacgacgcacagacgcacgaccaacagccccaaacgccagcaaacgagaggggcgagggccagggggcagcaggaaaaccccccaaaaggcaaaagaagcccccagcgggaccccgccccggagcaacaagccaccgcccccgcccaagacgaacgaaccgcccaagacccaaagccccggccgaagcgcaccaacgggaagcaggggagggaacccgggacgggagcaacaggggcgggcaagcccagcacaaacggaaggcacgggggcccagagcgaagacaaaagggcccaacggggaaagagacaaaggcaagagcacacagaaagagcccaaaagaaaaaaaaccacaaagccaagcagccccaagaggggggggaagccagggagcacagcagagaacacaaccaaaccaaaaaagaacccagcccggaaggggagccaggagcggcagcgcacccacaggcaaacaagggggagcggcagacgagaaaggacacgaagacaagccgaccccccgggagacggaacaccaaaaacccccaaaaagccacagggaaaggaaaggaagggagggccacaaaaccagcggacgccaggagcacagaagacgaacccgacggcaccccgagggcaacagaggcgcggagagggcaaaaaaaccgcaccagccggcggcccacccgagcagccggaggagagagggaagaagacagggggaaacacagccaaaggcaaccgagccggagacccacccgaaacacccgccagagagggaccaccgccaccaccgagcgcagagaaccccgcccccaccagcacgagggcccacggaaggcccacgcgaggcccgaacaccacgcaagggagagaggaaaaggaggacccaggcaggaccaggcggcgaagagaagcccgaggcggacggaagcgggccccagaggacccggggaggagagggggaagggcacggaggggccaaggcacagccagacacaccaccccggccgcacagccaaggagacccccaacacagcccggcccacccaccagcgcggcaggccacccaacaagaagggacaacacagcgccagccaaaagaaaggacacaaccccacacacgggcaaggaaggaaggggcaacgagagggagccgggacaaagaagcacggcaggggaaaaaaaacacgcacaaaaaaaaagaaaaaaaaacagaaacaaagcggcccagcccgacaggggccacaggaacagcaaggaggaccacgcccacaggcaggagcaggacgggggaaaggggggccaggaggagaggaggccaaaggcaaacaagaaaaagacagcgggaaaaagggacaaccaacacaaacgcagagagcggcagaccagagcacaagaaaaagcaaccaaccacagaaggaggagcagagggcaagaagagaggcaaaaggccagaagggagagaccaaaaaacaagacacaaagaaccccccggaccccccacaaaccccacccacccccacccccgccaacaaggggcgcccaacccaaccccaacccgcccacgccacacccccaagggggcacaagccccacaggaacacaggccccaccaaagcagaaaagccacggcacaggacggagccagaccccccagcaaccggggggaagccgggagccgggggccaggaagacaggggcgcaacccccagccccagcccccaagccccaggggccccgagcggagacgaacgacagagcagagaacaccgggaaacaggacaccaggccaagaaagaggcaaaggggagggcgcagagggaggaacccaggggggacagaggcccccccagcgcgcgaaaaaccccaaaggacccaaacaccaagcacccaaaagcccccaaccccccccccccccacccacccacccacggccggcgccccggccggagggagccgaccacagagaccagacaaggagaagcaaggacaacaaccacagaaaccaccagggccagcaccaggaaaagcgccacggagggcccgcaaagacaaggaccaagggggggcacgggccaacaccacgcacgcgcgcaaccagaccagcagacacaagcgagacagcaggcaggcagggaccaccagaggcaccgagaagagcgcacagggaccagagaagcagagccccaacggaagaagagggaagagaggagcagaggagccagagagacacgcggacgacacccaagaacacagggaagccagccccaggcggacagagagggggggaggaagccaaggcggccagccagagaagacggaagcagggcagaggcaacacacaaagaggcaagagcaggaggcagaaaaaaggaagcaagaaagcggcccaaccaagcaaagggcgcagcccggcccgaagaaaacagaacgagcccacaacccgaacccagcaagaacacgaaaacacgacaaaaaaaagagacaaaacaaagcgccccaaagcccaaacaagagccagaaagaggcagaaggaaggaaggaagagagaagagagaaaacagcgaacaagccggggccgaccagaacccacccacggaagaagccgagaagcagcaaagccagacggggaggcgggacagagcaaccaacaggagcgcagcgacaagagaccacccaaaaacgaaggaagagaaacccaacgaacgacccaacacaacacaggacggaacgcgacacaagcaggggccacacgacgcccgggcggaccaaagccagcccagagggcaaaggcacaacccccaggccacccagacccccgacccaagcgcagcagaaaccggagcgagagggggagcaagagaacagaaaaggaagcgaacgggggagggagcacaggcgcagaggcccacaaggggagcgacaggcaggaagaaaggacccaggagaaagaagagaaaacagacaagaggccagggggaaaagaggggcaggagcccacagggaggggaagaagggggggaggcggggcgccccccgccgcccccccccccccggcgccgaagccagaggaagaacgacgcccagaagccccgggacgggcccaagcaacccacaaagcaagccacagaccagggggccagccaaaggagcaggaaccgcccggggccaacccaaaaagacaggcacaccggcacacaaaacgcaggcaaagagcagccaacccaacgcgagggaaacccccacgggagaccgcccgcaccacgaaggcaccgcgaaaccaaggagacaaagagccaggaagagaaacaaacagcaagagggagaagcacgcaaagcaacccagagggcaggagcggagcccagagaacacgcacgaaacgcacacagaaccagaaagcaccacacggggcaagcggaccgaaccaagcacagccggccccaaagccaaagcgaacgggcaagaaaacagggagagcaaggcccgagccagcggggagggaagacacgggaggggcgcagacgggaggagagaggagaagacacgcacacacaaaacacaccaacaaaacaggcccaggggggacgccggaaagcaaagccgaaggaaaagagaagaagaaaggcagccacagcgacagacaaaaaaaagcaaggcgagaaagcacaccagagaccgaggacgcaggaaccggaccagggaaagaaggagccaaggcaaaggaaagcagggaaaaaaaaaacgaccgcaaagcagcagcagcaggaagcggcgcccgggaggagacagagggggaaaaaccccagagaccggggaacaagagacaacaaaaaaaaaacggggccaaacgaaaggccgaaggcaaccaaacaagccacggacagccgggcaggcaggcacggaacaaccaagggggcagagaaaacgggccagcaggcacccagcaaacgcaaccaccaaaagacaacccggccaccaggagaagcaggcaggcccacgacacgagagagggaacacaggacccagcaccagcaccagacaccaagagggcaggcccgcaggcccgcccaccgcagccacacacagacaaagcaaaccaccgagacagcacgggaccagaaccccccgaaagcaagggaacaggcggcccaagggccaccggaacagcgccagagcacccacagacaaaagggcgcgccagagggcccacaacaaagaagggccagccagcaccccccaggagaagcagcggacaaaacagcgagacaggacaaggcccccacccccaggagagggaccggccagccgggccaacaagcacaacaccagcaggaccgggaaggagagcgcgggcagacacgaaggcccccgagcagcccggcccacaacaaaaaaaaaacacagcagagaaagcccgcacaaacaaaagagaagaaaaggagcagaaaagcaaagccggcagcaaaggaagacgacaaaaggaaaaccggcaggggggccacggagagacaaaaacagagccacgaacaaaggggacaacccccaggcaaagcaaaaacgcacaaacgggggggggcaccaaaagacggaggacaaaagaccggaaaagccccggcagccaaccccccaagagccggggaggaaccgaggagcccccaaaacaaaaccaccacgagacacgaacgccagagcagacacaccagaagagggcaccggacccaacagaggggagccaccaggggcgggaagaaccacaacccggaagaacagcaggccaaccagagccaccccagcccaccgaaaaaaaggacaagaaccaaaacagccccacacagaaacggacacaagagaggaaccgggaaagcccagaagaaggagaacaaccaaggaagacacaaaagccgggcggcagggacccagggcacacggaacgaacccaaaagcaagacccagccagccacaaacaaaacaccaaggagggcagggaaaaagaaagcagaaggaaacggcccgaggagaggaagaacagaccagccacccaggaaagacacaaggaggggggcaccgcagaacaggaagagggaccaaggcggcacaagaggagcaccgcagaggccagcgccgacagccccacacaaacaaaccaccgagggacgacacaaggcccgaagggagaagggccacaggggggccccagaccagaacacacgagaaacaggcagaacagccggaccacagccgcccgcgccgcacagcggcgaccggaacagaaccagaccagccaaaaaggaagaaacgagaacacccaaccaagagccaagccggcagacaaaacaccagaccgaaggggacagagaagaaagagcggacgggccagaagaacgaaagagccacacaggggaagccggagcaagcagcagcaaccaggagcaacggaaaacgagagcccaggccaaagcgagcagaggcagaagaacgggaaccaagcaccaagccaagccaagggaacaccacaaac

SEQ ID NO: 782 - RNA, 1394 nt, Mus musculus
gacacaagggaccagcgagaggaagcagccggccagccagcaacgagacggggcaccggccagggacagacaacacacacacacacacacacacacacacacacaccgagaggccacccgacccacagcagccgccccacgggggaagcccaaaccgacacacccggccaccacaccccccaaaacaaaacacccacacccagaacaaagcgacaccgcggcaggaagcgagccccaaaccacgcggaaaagaccccccccgcccccaagggcagcggaacacagacaggagcaacggaaccccaacacagacagcccggcagacgcgcacgcagcaaaagggaaccaacaagcaaaaacagaagcacaaaagccaggggaaaggcagagacaccggcacacgcgagccgaaaaacgaagacggggaaccaggaacaacagcaggaagaggcgaacaccagcgaggagcacacggcccccagaaacaaagggacaggggaggggggcgcaggagagaccagacccacccgccagcccagcggaaacagccccgcggcaagacagggccggagcccggcgccggaaccaccgagaccaggcggcccgaaccagagacgggccccgccccaaggcgggaaaagggcgccaccacgccggcaaaaaacagcacagggccaaaacagaaagaggcaaaccagcgagaaaaccaacacaaaaacgagcacacagacgggcagccggagacaggaggcacgaccacagcacacgggaggcgaaccaaacaggcaccccgcgcccgagaaggcgccggagagcgaacacgcagcagaggccccacccgccaaggcagcccggcccgacagcgccacacagcacggggaaaaaggagcaccaggaaaccaggacaggccagccagaccccaacggggcaccggcgggagaaaccggcagggaaaacaaacacagcaggcaccgagcaacgcaagcgggcagaacaccagccaacacgacacgccgcaccgaaaaccgcacagaaaccacaccggagggagcccagaggaggccacacgggcaacagccccccccaccggccagacgagcaagcagccaaagccagacaagcgaggaagaaaacgccccggggaaggcgaggccgaccaaggggacgaacccacaccgagccgcgagaccggaaaccaggggcgcgacacacgaggaacccgcccgcaagacccagcaaaaacggacagaaacccgaggcgcggacaaagacgagacggacccagcacgacgaaacaggcacacacagcacacgaggccccccaagcggggcgaaaaaaggaacaaaggaaggggcagcagagaggggcccccaccccaaagaaaacagaaag

SEQ ID NO: 783 - RNA, 5031 nt, Mus musculus
gcgcgcggcgcgggcggggaggggggggggggcgcgaaacccagaaccccggagggcccagagggaaagggacacaaagcggcagagaggaggccgggaaggacgcacacaacgaccagcgggggccccccccccgagaaacagaggacaaggcgaggagcaggagcccgaaggcgaggcaggaagaggaagccaagggaaggagcgagaacacagagaagggacagagagaaaaacacgaaaagccccagcggacagcaccagggaccccaccccgggagacgggacggacagccggagggggcgccggcaggaaggggagccgccaggaaccagaagccccccacgccccaagcagaaaagacgcacgcgaacacacccgggaacaaagccaggagaaccgcagagacaaagaaccaagcgggcccccagcgccagggcaaagagacgaaccgaccgcccaggggcccccaggaggccgccacgacccgcagaagaccggcacgcccaccagccccccccccccacagcacggaagcagccgagcaaccacaaggaagcaacaacaacagagccccgagcacggacaccgaagaagccagacaaaacaacacaaaagaacagaagcacacggggcacgcgccagggagccgaaccccaggccaagagccagaccaaaccgagaggaacaaaaacaagccaacacccacagaaagacagaaacaaaaacaaggagaaacagagcgagaggcccggaaggaaggcagagcacaagcaacaacagccgggcgcaggacacccacgggccacaggcacaacgaccaggcaccgcacgccgcaggcgaggagggcacagaggaagaaggaacaagcccagagcgaaggggcagcagaagaggaaccaaggcagcagacccggcgaccgacaccccccccgcccccacaagagagccaagggaaaagggcaccaaagagaccgagcacaagaggaggggggccaggagcaagaaggcaggcgagccgaggcccagcgcagggcggcccagcaaaaaccaaggaagggcccacgccacgcaggaaacgcccgcagcggggggagagcccagagaaagaacacgagggcagcgaaggaagaaaggcaagagaggacccagcagcaggggggggcagaagggggggggagaaggagggccgcagaagagaggaaggaacgaacaaggaacaggggggggggggggggggaaggggcggggggggaagaaccaaaacaaagcaccacaccagccaaacgaggccagacaaagaaaaaccagaaaaccaagcaggaaggggcacacacacacacacaccacaaaacaaaacaaaacaaaacaaaacaaaagacccacacaaacgaaaaggaccaggcacccaccaggcaaaagaagccggcagaaaagagagaaaggggaagaaccaaaaaaacccacagcccaccaccagcgagcggagaggagccacgcagaccacagagacaaccacaaaggccaccaaaagggaaaagagagaaagaggaaggaggaaagccacgagcaggcaccaagaacaggaacccgggccagcgcaccaaggcagaagcaaaacgacccgaagaggagcaccacaaggcccccagaggcgacccacccgagccgagcaagcccccaaagccaggaaagcccggcaccacccagagcaccaggaagcagcaccagcaggccggacacacccgaacaggcagggaggccgagagcaacggcaacagaccaaaacccagcaccggaaccaccccgaggcggaaggccagcaaaggcagaagggcacagggaacggaaggccagcaaagcccacggcacagggaacaggaggcgaaaagcaggcaccacagacgcaaaaccaagggacgagcggggggggggggggggggggcgcgcgcggcacgcgcgcggcgaggcaaggcacagggacaacacagaaaaacggacagggcaaaaggcgagagaaggaaaaccacaagagaaaaaacaaagaaaagccacaacagaacacccaaaaaccaaggaaaagacaaccaaggggagaaggcccggcccccgaggaagaggaaaggaggcccgggaggcagaccggagaaaaagccaagaaggcaccaaaagaccaagccccaaagaaccaccgcggccaaggccacacacgggccccccggcggcaaaagagccccgaaaccagcagacccggcggggccacccaagccccacccggccagaacccagaccaggagaaaagagaccagaagaagcacccggccccagcaggggggcacgccacggagaaccagaggcggcaccgcagaggggcacggcggcggcaggccccgccgcggggagggaaaaccgggggagccaagcacgcgcggaacagaggaggaggcaccggccaaggggacgccgaacaaacacagggggggacaggccagcaccccagcacagaagcgagacaagagaagcagacaagggcagcaggaaagagcgagacccagaaagaaacaaggaaccgaagaacaaaacaaaacagaacaagaaaacgcgccccagggaggggagggcaagacggccgcacgccgggggaaggaacaggacaaagagccaccaaggcagggaagagggcgaaacggacgcaaaaaaacaaaaaccagaccaagcacacagcagaaaagaagccccaacacagccagcccacacccagaggcgcacgagaccaggaccgaaagaaaccacaacacaaacagcccccgcgccccgggacaaagagcccaggggcaccgggccgccaccccgaggccagcagagagaacaaacaggaccccaagagcgccccccaaccccccggagggggggggggggggggcgcgcacgcaggggggacgggcgaccacgagaaaaccgaaccgacgcgcacccccagaggggaacaggcagggccgaaggcgaggacgaaaaccagggcgaaaagcaggcacgacaacaagcacacccagccccccaagccagcagcgccggccccgaaacccaggccggacaagcagcccaaaggagcgccaaagcaacaccacaaagccccgaagaaccagcaaagcggcaaaacgcaagcaaaggaaaccagcggacagaagcccgagggagggaccagcacccgcacaaaaaaccaaagccgggcacaggagagaaaagccaaacaaaaaccaacaagaagaaagggggaagagcacaccacagggacggaaaggcagaggcaagggagcagcccccacggggaaccgggcggggcaagcccccacgcagcccccaccagccagaaaaagcgaggaacaagacgacagagagcgaaaaggagggaacccgggcgagacagggcccgagccggcaccggaaccgagaccaggcggcccgaaccagaaaccccgcccgcccccaaggcgggaacaggcggccaccagcccggcaagcccccaccgaaaagacaaaagagaggcacagaagcaaaagagcaccacaagaacccagacgccccggaacaggagcgcacagccacacagaccccccaaaacacccagccgaaagcacagagaggaacaccaagagggacaagcggacaggcaaagcgcccaaagcacaaccaaaaccgccaaggacacagccaaaggacaaacaaaaaacaaaaaacaaaaaaaccaacacaccaaacagacggcccagccagggggacggaaaaggccaaaaaaaagaaaagaaaaaggggggggagggggcacccggcagcagaaccaggagaccagagagagagaccggaaccagcacaggcaggagcagggaacgaaccggccacaaagaacagggccaaccacggagacacccccaagcccagccaggaaaaacagcgcaaaaacaaaccccaaccccgcccagccagggcaaagaaaaagaagcagggcaaggaaaacggaaggaaagagggaaaggaaacagagaggcccaaccccaaaaaacaacgcagggggggacccacacgaaccaggccggaaggggacgaggaggccacccggacagagggagcaagcacacgagaccgccaaaaaaaagaacaaaccaaaccaaaccaaaccaaaccagccaggagcggcaaaggcagaggaaagggcgcgccaaggcaacaagccgagcaaagcccaggagccacacggggaaagagagaaaccgcaaggccaacccccggcaccccccccccaaacacacggcaaggcacccccccccccaaacaaaacacaggcagacaaagaaaaaaaaagaacaaaaacaacggcagaggacggggggagagggaaggggggcagaaagagaaaggaaaaagagagacgacaaaaagaaaccaaaagccacgagacgggaaaaacgggagccagaccaacgccggccgggacaaagagagcccggaagccacgcaaaagccggcccccgcggaggggaagaggagaggaacggagcagcgacaggaggcccaccaaccagcaagccaccagaagcggccccgccggacacggagccagcgcaacccaccccacacaggagggggccgaaggcggagcccccggcgcccaagggaacacgagaagaaagacccggcgcaccaaggaaacagcaggagccaagaaggaaacagcaggagcccagacacaagcgacaacgggcacaggagacccgccggccccaacgaaaagaagggaaggcgacagacagcgacacagaccacagagacaagcaacaacaagagaaaaaaacaaaccaccggagccccaaagaaaaacccagaaggcccgacaaaacacaccacgcaggcaacagggaaaagcccccggcgagcacacagggcaggcggccgggccgcacacacgcgccaaaagaggcaaaccacagcagagggacacggcaggggacccaaggaaaacaagggaaaagg

SEQ ID NO: 784 - RNA, 11314 nt, Mus musculus
agaccaacgacaaggacagaaggccggccaaccaacaagaaaaccaaagacaaacagaccagcggccaagcacaaggcccgaccagaccccacaccacccacccacgcagccccccggaccgcacagaaaggccgcaggggagaacgccggagggcccggagccccgggcaaagcagagaacccccaggcgggggcaggaggggcccacagacacagggcccaaacggcaccacgcgcagaggagcagggaacaaccacacaacggcccaccacacaacggcacccagaagccccacaccggacaaccgccgacaacggccccagccccccccacagccaggcaaaaggagcggccaaaaaacccgcgaaagaaaccgcaggagaagcacaaccccacccagaaccacacgagacggcagaggagaaccagaagaaaaaaaaacagggggagcgaagcgaggaagcggagccagaccacaaggccgcacagccagagagaaaacacaaaaaaaaagggggcagcgggggccaagaaaaagggcgccgaggggaacacagcacccagcaaaaggagagggcaagaaccacccccaaaagcccgacccaagaccccaagggacacccgaccacaggaccacacacagaagaaggagaaaaaaaaaaaaaagagagaccgggacgggccaggggaagagacccaaccccacaaccagaaccagacggaggcagcacgcaacccgggccaggagagagggagaggagacagaagggccccaaaagccagggccagcagccggcaacacaggcaagcaacaaaggacaccacaagcaaggggaagggaggacccacacaagaggggccgaccaccacagcacacacccacagaaacacacaaggacagaagccgagcacaggcacacgcacacagcacacacaaaggaacaaaagccaggggaaagagccagaaaaccaccaacagccacgggccgaagagaaaacgcagaggcggcaagccagccagaaggaagggccgggagcccggaggcacgaccccgcaacaaaacaccaggggagcacagaaaagcgcgggaacaaaaccggcccgcaagggcggcacagccagccaccaaccaccccgacccaacagaaaaccaaaaacggaaaaagaagcagcccccaggaaacacaacggaaagcaggacgcccagagcagagcaacggaggcaggagagccacagcggcgaccggcgaaccacggcggccacacacaggaggacagcaaaacagggaaggaaggcgaagcacaacggaaggaaaacgaagaaagccccacgcagacccggcaggggccagaaagcacacacacgcggaaccaaaaaacagccaaaaaaacaggggcaggcaacagcacaagccgcagccaagccagcaccaggaggcagaggcaagcagaccagaccaaggccagccggccacgaggagcaggcagccagggcaacagagaaacccaccaaaacaaaacaaaacaaaacaaaaccccaaaaccaacaacaacacacaaaccccaccaaacacacaacaggcaagggccggagacaaagccccgaaggcaggggaaaggcagaaaagcagaaaagcgggcaaagccaaaagggccggcaaggaacccacagacccgccggcacacagcagcccagaccagaaaggcaggcccaggggaacaaacacaaagggaagcccccccccaagagagcagagcagaaggcaaagagcaacgagagcacagagcaccaggagaggaggaaccggagcaagcccagccccaagcgcaaccaaacacagccccagggggacccccaaccaaaaaggcaccaaacgaacacgaagaacaagaaaagcagcaaggcagggaccccggaaagagcagcaagccaaaggggcacaacccacaggccgagaaccagccagaggaacacgccagccccaaccaacaggcagcaagagaccaggcccaacaaggggacagaaaggagagaccgacgcagggcagcacaccaaaagaacagccccagagggggcggcaaagcaagccagcagggagggacgaggcacaaggacagcaggcaaggaagggccgcccaaccggaaaagccgaagcaggagaagacaagacgaaagcgagaaaaagcacacaggacaaagggcaggaagacggcagcaggaaaagcagcgcacacaagcagagcaccaagcaaagcccccaccaacagccaaaaaaccccagcaggccaggcccggggcacgccaaacccgaaccaggaggcagagacagggggccgaggaggacaaaccgaggagccaggacagcagggcacagaaaaacccgccaaggaaaaaagaaaaaagaaaaaagaaaagaaaaaaaaggaaagggaagggaagggaagggaagggaagggaagggaagggaagggaagggaagggaagggaagggaaaggagaaaaaaaacaaagaaaagaaaaaagagagcagagccaggcaggccaggagaaccacgggcggcgacagccgccgggcgagagagacccggccagggacaggaaaaaaacaccaacgccccggcccacacagccccccacccacccacagaaaaagacacacgcaacacacaaaccacacagaaagcaacacaaaggcagaaacaagggagacacagacacgcaccacagcacaaggcaaaacacaacacaagcaaggaggaaacggagaagccaacacaaaagaaagcggacgccccaaaggcggagcaggacgagcccgcaagaaacagaggcaaaaaaaaaaaacagcgcacagcaaacaacccaagacaaagaccgaagcacccaaagaaaaagaaagaaagcggaagaaaccaagacaaaaacagacccagcgcgaggcaaggaaccagagagcaggcaacgacacaaagagagggccccagaaacaccagaaaaaagaagacaaacaaaaaaccaagaggaaggcaaaaaacccacaagaaaaacaggaacaaaaaacaagacccacacggacacgaccaaaacggaaaaccggacgacagcgaacccaccagaacaccaacacaccggcccccggccccaaaacccaaggcaaagcagacccccccgcggcagggcagcaggcacgggcacagacacacacgagcagagacacacggcaggaacagaaagaaaggcgagaagcaacggcagcacgcagagaaccaaaaccaaccaaaaaaaccaggcaggcaaaccaccaacgacaaagaccgcggccacaaaaaaagcaaaccccgcagcagcacccagggccccaccagcccccagccacacccaaaccaacgcaggcaccaccaggcaaagggagcccaaagcccaaagcgcacacccccgccaggcacaggaagcagacgccacccaccagccggacccaccacaagcaagccagaagcacccgaacccccaccccaaggaaaggggacgcgcgcgcaaccccacaaagcacacaccccgaacaacagaacagaaccaagagacgacaaacgaaccaggcaaggagaggacagagacagccagagaagcacgaagagccaacaaaggacggaaaaagaggcaaaaggggacggagagcggccaggggaaagcacggcgccagggacccaggcgaccaccaccaagggcacaaccacgaacccagccgggggaccagggccccggcccagagaaccaaacacggggcacagacaacacgcaggcaaaacacccaaaaggacgcacagcccagaagcaaagcaggagagaggaacacacgacaccccccccaggaaaaagaggaagagcagggagaaagcaccgagccggcaggaggccagaccccaacagaaaacaacagaaacgagacaaacccgaaccaaacaccaaaagggaagaaccaagaacaaacaagaacaccaaggcagagaaagagcagcccggccgaacaggagagcccgaaagagaagccagcaagaacaccagccggcccacgcagccagaaaacagccacccaggcgcccaggcagagaccaacagaaaccgcgagacccagaaccaacggccgccgcaacaacaaaagacaacaaccaaggccagccgggcacagagacgacaaacaaaaccaaaaaaaaacaaagaaacagaaacaaaaaacacaagacacgaaccagaaccagggaacaaaaaccagaccacaaaaaagcaaaaaaaaaaaaaaaaagagggaacgaccacagaaaaggaaaaaacaaaggaaaccaagagcccaaaaaaaccccagcaaacccacaaagcacagacaaagaaccgaaggcggagaaggaaaaaccgagcagaaagaggaggagaaaaagaaaaaaaaaaaacaacaggcaacacaaaagagaccggaccaagaaagaaaggaagcaagaaaaaagaagacaaaaacaaaaagaaaaaaggaagaaagacgggaaacacgagggcaaaacccaaccccacacccaaaaaaaagaaaaaaggaagaaagaaagaaaaacaggaggggagcagggagggggagcacaggcgcacacggcagggggagggggacccaagaaacgagcagacaacccagaacccaggcgcgcagggggcacagcacccaggcccgaaccaacaagaggcggcggccaggagccccaggcaccccaaagcccagaagaaaacaaaaagacgagacaacagacaaaggcggcaaacaaaggagaagaggccaaacaagcaagcgcagagagaaagaaacaaagggcccgggagcggagagacaggcgagaaacgggaggacgcacaaggacccgcgcgcaggcacaacggcccgaggcgggaggaaaccaggccacgaaagcaaccacagcacacacgagccccaccccagacggaggaacacaaaagagaaggccaaacccaggagccagaagcaggcaaaaaaaaaagcagaaagacccagacagagagcaacaggcaaccgcagaccagaagaaagaccaaaacacaaccaaaaggaacacaacaaacagcaaggaaaacaaggccagcccggcgcgagccacgagaagacggccccagaccgcaagaacagacccaacaaggaaaggaaagaaagagagaaaaacaagggccggagaacggacgcgaaaagacaccgccgggcaggaccagagggcgagcacccaaccggcagccagggagaacacgccagcaaagaagcccggcgaccaggaccaggagggcccagcacccgggggggaggcagaggacggagaaggacagagcaaaaccgcggcacaggaaaccagacaaaagagaaggaggaagaggagcagggaggaaaagaaaagaggaggaagaggaaagagaaaaaaagcgaggacaaagcaaaaaaagagaagaccacacggagaccccacagaggccccggaaggaaagccccggcgcccccaagcgcccgacaaaaaacagcagaaagaagccgccaagccagcaaaaagccgcaacgacaaccagagagccgccccggccgaggacacagagaaaaaacagaaagaaccacccccacccgccgaaacaccaaggacaccggaagagaagaaccccaaccccccaacccccccaaccccccaaccccagcagcgaaaagcccccacgcacagcccagggagaacccccgcccgcaggcagagggaccgcccagcagcccgcaggcacagggggggccagccacccgggacgagcggaggccagcacgggggggggggccacaacacaaaagccagccaaaaacagaacagcgggagaacgggggagagcaccgccagagcgggagccgaaaccagcacgcccaaagcgaaaaaagagaaaaacccaccggcgcgagaacagagaaagagcgacacggaacaacccaaccaacaggaaccagccgaaggaggggggacaagcgaaacaagggaggaacagggagacgcgagcagaaacccaaaccaagaccggggacagagccgcccgccagggacggggaggcaaaccaaaacaaaagaacaaaccagaaacccggcccccaaccccccccgagcacagccgacgggaagcgaaaccaccaggccccagacccggccgcccccgcacacaccaagaaacaacccggcccaggaacccaccgccaaacaacagcgcaggcagcggcagaaacaacagaccaaaacaaccggaaacgcaaacacaccagggaagccaggaaaggaacaaaaagcaggaacgagcggaagccaggaggaacgcacagcgccccaccagccacaggaaacccaccaggcaggcaagcccacagggggggcccccacacaacacaccaagaaaaggcagcagggaagcaccaagacccccccagaagccaaggcaaggacaaaaaccaacagcccagcagcccaacacgccgagagagccgccggaagaggagagaccgcccacaaggagcaaaggggggaagccccaaaccaacagcgcccaccaacccagccacgccaggacaaccagacaaaccgacaaaccacgcacaccccgcgacccccccacacaggagagggaaaaaaaaaaccaagggggacccagcagagccaaaacagagagagaaaaaacaaaagcaagcgagacacaccaaacgcacgaaaaaaaaaaacacacaaacccagagaagaacccagaaacccaagaaaacaaccccccccccaccagacagaaaaacaagaaagaaagaaagaaagaaagaaagaaagaaagaaagaaagaaagaaagaaagaaagaaagaaagagagggggggagagaggggggaagagagagagagagagagagagagagagagagagagaaagaaagaaagaaagaaagaaagaaagaaagaaagaaagaaagaaagaaagaagagaagagggaacccccagccaggcacaccagacgcaccagcagagccccacccagacaagagagaagacccccaagcaagggcaacaggcaacaaaacaagccaacccaagcaaccggccacagaacccagccggaaaagccaggagcggccggcccccacacacgaccaagacaaccacagggcccccacaccgccccagaccaaaacaaaccacaaagaacccaggcccaacccaaccaagcaaagcaagcagccaaaggggccacaccaaaggcacacccacggcaccaccagccacgccccacacgccgcccacacccgacaccccagcaggcggaacgaaacgggggagggaggaaccagggccccaaaggaggcaagcacacaaccacacgaggacaccccagaccggcacagaaaccaacagacagcgagcagagggagacaccaggaagccacagagaccagaagaaagggaagcgcacagggcaagacgggggggggggggggggggggaaggcaaggcacagcggaagcccaaaacccccacccggccgagcaccccacaccaaaacaccccccacccccagccaccaggcgccgcccaccagaagaccggggaaccacaccgagagggaaacacagcagaggcccacacaggggcccccagccacccacccccaccagacccggcgcccccggccccgaacccagcaggccgagccaacaagcccacggagccccagcccagaggaaagccacagaaaggcgagaacaggacgacggggcccacacccaaccaaccaaccgaaccgggccaggcgccccacccacccaccaacacccccgccccagaaacccccacccccaagcccaagccagccacccccaaacacccagccaaaggcacccagcacaggcaggagggaaccacagggggacagagaggacagcaagcagcacacacaacagcacggcaggagaacaggagaagaaccaacggggcacacgaaaaagccaggaaaaaagacacacagcacaccacaacaacaacacaaacaacaacacacacaaccacagcaaacaacacaacaaccacacagacacaaaacacaacacaacaaacacacacgaccacagcaacacaacacacacaacacccacagcaacacagacacaaagacaacaaacacacaacacaaaaacacacacacacacagaaacacaaacacaacacacaaccagaccaacagagaaaggcaagcaaggcccaaacgcacacaagacacagaaacagccaccagccccaccccgaaaccagcggagcccccaccccaaacagggagaggcacccgcaccagggggccccgacccggcacacgaaaacaaagcacaacacgcacaagcgggaaggagacgaaacaggcacaaagagaagggacgggcccagggacccacaaggagagcgccaccggcgaaacgaccaggaggaggaggaagaggaggaggaggaggaagaggaggaggaggagacaacagccggcccccgggaagccccaccgaggcccagcacaaggacccaaaaaacagcccacgaccaccccccgcgaaaagccgcggcaacgggagagacaggacacccccccaaaccccgaccgaccagcccaacgaagagcacccgccccaacacagagcaaccgggcagcaaagcacgacccagcagcggagcccaacggcccagcaccacacagccaggaagagcccccccgcaccacgcaaacaccgcccagaacccaccgaacgaacaggacaaagccaaaccagcaccaaggcggggcaggaggacacaccccacacaccgagaaagcagggggagaacggacaaggaggaaacgcaccaaggagagcacaacaaggcagcccaaccacccccaaaacaccacacccaggggccaggagggggccagggaaaggagcagagcaaggccgagcaaccacagcacaaaacacaagaaaaaaggagacagaggaccggaacagccacagaccaaaacaagaacgacgaacgcaggcagagacacagaccaaaaccgcaaacaaggacacacgagggagacggcgcacagcacgacacaaaagagagcaggaaaagggaaccaaggagaaaaacgccaagaggccgggcgagcggggcacccgagaagacgcgaggaggaccagccacggaggggcaccccgggcggaccgggggcaagaaagcaggcgagcaagccaggagagagcagaagcagcacccccagccgccaaccgccccaggccgccgagggccgaccccaaaggacggacgagaagaagcaaaaaaaccccccccaaagcggcggcgacacagagaaacccaagacagagacccaagggggaaggaagaaagccacgaagaccagagcagaggggaggggagccacagaaagcgagacacaaaacccaaagaaggaaaacacaggcaaccaaaacccacacggggaggcagaggcagggagaacgagcaaggcagccggcacaaagaaagccagagcacacagagaaaccgccaggaaaaaacccaaacaacaacaaagagcaggaaagagaagggagggcaggaacgcccacaagcccaccaccgcccaccagagccggggcaaagggagacaacccaccaggccagacaacccaaaccagggcccccccccggcccaaacaggaaagcagaaccaccaccaccggagccaggcggcaaaggagagccagagagagacggggccgagagacggccacacccccaggccacaaggcccggggcccaccaggaaggaacagaaacccaaacaccagccccgccagcaagagagacgacccccgccaaaccagcgccaccagcccccgacgcgccgccccacgcaccccagcgaaaccaccaaccggggccggggacacaggcacacgagaaaacaccggaaccacagagccagacggccggaaccacggcaggcaaccaccaccacacaggaccacacacacaaagacccacaggaaggggcaccccccccccgaaaccaaggaaccgccagcgccagcaaaggcgcccagaaaacacaggccccccgaccagacaccccagagcacgacacgcgcaaggggcagaccgcccaccggaaccccggcaggaaacccaccacgccacggcccaagcaaaacacagacagccgccccccgggacagaaccacagaacgccaacagcacggacacgacccagggaagaaaaaggaccacggaggaggaggaggaggaggaggaggaggaggaggaggaacacaaagcaggaaaacagacaaaaaacgaaggagaagaacaaaggaaaaccccaaaacccaccacacaacaagccgggaaggaaaaaaaggaaagggacagggggggggagagccacacaggcaggaagccgcaaaagccagggagacggaagcgagaaccagcggccgccccccacaccccacgcggcgcaccggcccccaaacccccacccgagccagccccaccccacccccacccacccgggagacgcgagggagcagggccgccccacacacaccccacagccccggggcgggcagcggcggcccgccgcccgccccagaccccacgccccgaccgcgccccagaccggagcgcgaagcgccgcgcgccgagacccgcaccaccccggccaggccccgcgacgccgcgggcaggcgagcagcagcacgagccgcagcagccgcgcaacccgcaccggagagcggcgcggccccggggaccccggcccagccgcggcccccccggcgcccgccacccccggaggccccggcaaggagaaaggccagaggcgcgaggaaggggcggcgcagaggcccggcgccggggcgccggcccggcggggagcagggcccaggccccggacagggcgccgggcaccggcgcgcgcgagcgagccacggggagaaagcggacggcaggggggaaacacgcaggcaagggacgggagaccagagaaggcagagccacaggaaagggccgacggacgggcagagaggggaggggggccgcccgcgcggagggaaagaaaggagaggaaacagcagggccagcacccgggggcacagcggaacagggacaaaacaaaagccagcacgcggacgacgcccccggcacgaggaacgaacggggagagacacggggagaaagacaggaagacaggacaaccgga

SEQ ID NO: 785 - RNA, 2222 nt, Mus musculus
gccagggggccaggaagaaaaggaaaaagaggcagccccgagggaagaaaagcaacaggacccaaagccccggccccaaaggggcagcaacacaaaaaacacacacaacacacacacacacacacacaaagaagacaaaaaaaaaagccaggcaagagcaaaccaaccagccgggagacggacaggcagccggagcgaagccacggcacaaggagccaggacagccaaggcagcagagagaccagccaaacaaacaaaagaaaaacaaaaaaaaacgacacgcaggccagcagacaaacaggaagccgcagagacacgaggagaggacaaacggaaaccagggcagggcaacacgggaacacgggagcggggagggcaaacaaaacaccaagcacagaagcccagggcagccgagcagcggcggacccggcaacggaacagaagagaaaagggaaaaacacgaaaaccagggggaaagagcaaagacacaaaagagggagaaacaaaaagcacaggcaaaagagaagcgggcagacacacccaacaaaccgaaagaagccaccggcccaccccacccaaagccccacgcccccacgccaacaagccccacccccaccacggggcgagagcgagggaccaaaccagccaagcagcaccacaaaagcacacccggcacaaagcacccccgcgcagacacccccagaggaaggacgcacccaagcaccaagggcaaggaaacggggacggcacgcgagaagaaccaggaggagagagccaacccgcccagagcgccggaaaagaagggaaaagagagaaaagaagaaaagcagcacagacccagccaagccgggccaggagcagaagcaaaaacaaaggacggccaaagggacgccccagacgcccgcgaaaaccaaacacccaggcacggcaggcagagggccaacaaaaaagccacacagcgacggcaccaaagaaagaaccagagccagccccccgccgcagcaccgaccccaaccgcccaccgcccccagagccgagggaagcggggaggcagggaagagggaaccacagggcgcacaaaaaagcacaagcagacgggagacccaggcagcagccgaaagcaaagcgccggggaacaagaaaacaccaaaacaagacgggggaagggaacaaggaaggaaaggagaagaccacggagccccagcgggcgcagacgggccgccagaaccggaacggcgaccggcccggacgaggcaagaagacaaggcaggccacaaaccgggccaagaccccagccagcaacacacaccaaccgacagggaaacacggaggagacacgggccacgaagaacgggaaaccacacagaggcagggaaggcaagcgaaccgccccgaaacccacagagacaaaggaagcacggggcccagaagccccggcggcgacacaaagcaaagcgcggaggggccaagcaacgggacagaaacagacagcaaagggcaaagcggagagacaaaaggcccaaacgaagagagccaaaaagcacaaccaccaacaacccaggacacgggcacggaagggagaagcggggggagcagacgaggggagcagagccagaggaaacagagggagcacaggaagcccgacccccccccccccaacccccacccccaccccgccgagggaggggggacagagaaccccaccaccacaccaccacacacacacacacaccgcccggaaggacaggagcccgcagccaagcgaggcagaggaaggcagcagaggagaagcaaagccgcacgagcggaggaacgaacaaaccaccaaacaaaagacaacagcaaaaaggacaaaaacaaagaacgccaaaaaagagcggaccgaccaaaccggaggcagaagcgagaaccgaaaacacgggaaaaaagacaaagacaacagccacgagggaggaggggcacagaaggaaaacagagcgcaagagggacagaacacacgccaaggagaaaaacaaagaaaagccagccgcgccaggcagcgggacaaaaaaaggcacgcaacaaaaggaaagggggccgggggaagccgggagggagccaggaggcagaaggggacgggggcggggagggggggcacagacgagagcagcccgaggggggggcagaccacgcggagaagaacaaaaacaccgagaggaggagccggcagggggcgcagagaa

SEQ ID NO: 786 - RNA, 11158 nt, Mus musculus
  misc_feature (5722)..(5821): n is a, c, g, or u
  misc_feature (6668)..(7450): n is a, c, g, or u
  misc_feature (8919)..(9018): n is a, c, g, or u
  misc_feature (9674)..(10270): n is a, c, g, or u
gaacacacgccacccaaagcacgaccagccgcacgcgcaagcccccccagcaccccccaggaagagacagaagacaaggagggggaaaaaaaaccaacagaaagcgagacgggacaccaggcgcggcaaaaaaccacccagaaaagacaagggagacgggcccaggggaagaccaaaaaagaaaagaagcaaaaggaaaaacagacagggcagaaccagagaagagaagccgacagaccaccccaacgaacgacacaaccaggcagaaacaacgacaagacagaaagaagcaagaaagagaggaaagagaagagaaacagagcaaagagcaaccagcccagcccccccagcccacaggcgaaggggagccacagcaaacacaggcgacgcacacacagggggcgaaaagcaggaaaggaacgaaaaaaaaagacaagacaaaaaaaagagaccagcgcaacaaccagagagacaaagagaaaacgccgcagcaaccaaacaagacaaccgaacaaaacgagaacagaaagagaaggcgaggaagcaacaagcagcgagagagccaccaagagaagccagaaaaaaaggcagcccagcacgaaagaaaaaaaaaaaaaaaaacaaaaaaccaaaggggaggagagcggaaagcaacagaaaacggccgaacagagaacgcagcacggaaaacagaaaccgaccgcggcagacaagagaaaaccacaggaaaccaaggaaaggaaaagaaaaacaggaaggcgaggccaaaacagaccagccaaagcgaagagaaagaaagacagacaaagaacgcaaaagagcaaaccgccgggaagagccggagcaagggggggggggccccccacacagagaaggagagcgacaggagccgcaagggcagcgccaccagaacccaccccagcacaccacgagcccaccccccaggacaggacggcagagggggcgcccgaaaggaaaaaagacaccgggagcagaagccgcgaccacagggagaagccggaggggcccggcgcagccacagacggggcgcgcacccaaacagccccccgagaggccaacgacaccaggacaacggcaacgggcgacaccccagagagaggagcagccccaaacaccagacgaaggaggcacaacgggcaagggccagacgcacgcgaacccaaagccgaagccagcaagccaaaaaccccaccaccacaggggccaaggagaacagagacccagaaagggaaccaccacgggcgaaccccacccacacggacaaagacaaccgggaccacacgccggcgagggccaaacgcacaggagcacaaggaggacccaggaaaccaggcaaagcgcacagagcagccacagcaccccaccacccgccccaaacccagaacaccgacagaagcccccgcgcggaccaagccaccccaagcagccaacagaccaaacaagcagagagaacgcacaccaaagcagcgcacgccccgccggacccccagcacccggaaagcagagcgaaagagaagaccaaagaaaacaaacccagggcaccgaaaagaaagaagccaaccaaggggagcagggcacgggacgagcagaaccacggcggaaaccaagcgacgaaccgagaagaagggaacaccaggcaggcaccaggccaggccaagcaaaacaagcacagcccgaacagggaaggagacacggcaggaggagcgcggagaaaccacaaggcaggaaaagccaagcagcaccacaagcgaaagaaaagagagcccaggacagaggcgccgcaagaccgaacgaaaaggccagcgaccacagcagcaacacaggcccaaaaccggcgagcaaccccaaggcgaaagcaccgacccaccacaacaacgggagagaacagacaagcacaggaacgcaacccccagcgcacgccgaaggccccgcaccccgccgcccccaagaaacgaacgccgcggacaacgaaacgaacaacgaaacgaacgacaacaaagaacaaaggcacaacagccagcacccaaggcgacaaaaaaaaaacaacccaagagccaccgcacaagcaaagaacagccaacacacccaggcgacaagccacccacccgcgcacaaacagcacccaaccaggacaagcaacaagagaaaggaagaagaaaagaaagacccggacgcacgcaaaggaacaacgacaccagaagagacagaacagacaagaaacacgcaggcgggcagcggagcagggccaagggcgggacccagaagaaaacacaagagggggccccccccaccgggccgggaccaaaccaggccgggagcaagcaccacagcggaccaagcggcccagaaacagcccaaaacaacaccccaacccaaccacccacgcccccccaaacaagacaagaaacagcagcgcccggaggacaggaggggaagggacggagagaggggaggggggaagggaggggaggaggagggaggggacgcgggcaggacacacgaagagaagaaaaaaacaaaaaagaaaaagaaaaagaaacaagcagcgaaccaccacaaccaacccaaacacacggccaaagggaaaaagcaaacagcaacaaacaaaacgaggaccaccagacaacggcaaaggaagggccaccaagaagaaaaaaaccaagaaaaaagagagagaaacggccaaacagaaagaaaagaacaaaacaaaacaaaacaaaacaaaacaaaacaaaacaaaacaaaaaacacccaaccaggcgagggggaaacaaacggaaaacacggcaaacaggcccccgaagaagggcaaagccaaagaaacaacacaaagagaaaaacccaagacagaggggaaaaaacaacaaaaagaagccaagaaaacccaccgaccgaaaagcgaacaaaacaaagaggcggagacacaaacaaacaaacaaaaaaaccacacccaggcaaacaaaccaacacaaccggaagcaggagcacacggaagcagcccgccccaacccaaaccggacagcagcaggccagccagcagccgcccagggccagaaacgcgagcgcccaagggcccaagcgacggcagacccacacaaccaaggggggggggggggagcaggagggacacaaaacccgaaacccggcccgggaagacacaacgggacaaggagacagcagcccagcaagacaccaaccacaggagaacagcagacagccacaacgaagacaagcacaaagcggcagccccccacaaagcagaaacagacgggaaaaaagggggaaaacggcacaccgacaacaaaagaagcgcaggagagccagaagcagcaaggcccgagaaagaagaacagcagggagaaacacgagcgagagcagaaggaaaagacgcaagaagaacacccaagaaaagggaaaaacacgaagacgcacaccaccaaacgaagggccggaaggaaagaaagaccgcccggaaaagcccacggacacacaggcagagacgcccgggcaacaaggcgggcggcaaggcggaaggcgcccagcacgacggcgcaagagcacaggagacccccagcccagggcaccacagggacagccaaagagaacaagaagagaaaggaggaaagaagaaaaggaaggcgccaggcaccaccccccaggcaaaaccaaggacaagagaaaccaaaagacaaaggaccgccacacaagccacagacccacagaagcgggaacgcggggaagaaaacccaaacaaggcagcaccaaggaccacagagcacgaaagcagcccacaaggagaaaacaaaaagcaggaaggagcaaagaaacagagcccgaagagacaaaaaccaccggaagaccagagccagcaacagagcaaaaaaccaaaaaaaaaaaaaaacaacgcgacgcgacccgacagacagcaggaacagagcagacagagggcaaagggaagaagagcaaaaggccaagaaaacacaacagaagcaagccaggagcagccaaacaagacaggaaaaaaaaacaaaccacaagaccgaggggcagcacacaaccaaagagaccacgcccacaacaacgagaaaaaacccacagcgaaaggcgaccccaaaaccaaaaccaggagaaaaaaaaaggacaagaagagaaaccaaaaaagggaccaaaaaaaaaggcaggcggacaaacagacaacaaagaacagaaacaggacacccaagacaaaagggagggaaaaccccccaagagggacggccacaggagcaagaccacccaaaagcaaaaaagagaacaaagaaaccaaacaccaaacaccaaacacagcaacaaggcacagcacccagcaacaagggagagcaacccaggacaagagcccccccaacaccaccccaccgaaggccagaaccccacgaggaaaggaagggcagccacgccaggccggcacgaagcaccaaggcgcccaacgaacagagccccacagaggccggccgaacacacacgagcacaggcccgcccgcagcacagagcgaaccagcgaagaggcagagagcagccagaaggagccaaaagccagaaaacacaaaagaccggcgggcccgggaaacgcagagggagcaaagaaggccacacacacacacacacacacacacacacacacgcacagagggggggcaggggacaagaaacaggaaaaaggcaagccaaaacaaagcaaagaaaggaagcagaggcacaaaaaaaaagcaaccagaacgaaaccgggcccaagcaaaagaaagaaacacccaaaacgaaccgaaaaaaaaaaaagaggaagaaccaaaccaacacaagaacagagaaagcgaacagccagaccagagaaaacgagaagcaaaacagacaaaaagaacacgggaaaggaacgaaacaagaaaaagaaccgccaagaaacgcaagggggacccagacagaggagaacgcacacaacaaccacccagaaaacagaagaaaaagcaaggaaaagacaagcaggccagccaacagaagaaagagacaaaaaaagccacccccgagcaacaaaaggcgacagacagcacaaccgaaaccagaagacaaagcaaaaaagacagaaaagcacaggaaaagaagggagaaaaaccgcaaccaaaaaagcagccgaaaaaggaacagaaaagaagcgggagaaaaaaggagaaaggccaagaaagaagccaagccagccccaaacacgggacaagagaaccggggaacggacagccgaaaaagcacaggacagaagggcaggcgcaaagacacgaacggagccgaaaccaggaaagcgcgagagagagaaccaacaaaaggcgagaacggaaccgaaccacagcagagcagggaggggcaccagccgggggacaaggcacccgagcccggcccccaccagagagcccagacccgggcgcacaggcgagggaggcggccaggacggcgcgaagcccgagcccagcacgcgccccgcgcacgcggccaggaaggagaccccgggaggagcggacccccaaaggaccggacacggagacggggggggcgacgggggcgagggaggaccgccccaccgcggggcccccgacggcggcacgggagaggggcgagcgggcaccgggcgccccgcgagccccggccagcgcggcggcgggaagccgagccggggcccagnnnnnnnnnnnnnnnnnnnnnnnnnnnnnnnnnnnnnnnnnnnnnnnnnnnnnnnnnnnnnnnnnnnnnnnnnnnnnnnnnnnnnnnnnnnnnnnnnnnngcggcgccgcaaaaggggcacggcgcaaggccgcacgcgcgggccggcaggagggcgcccgggggcgggcgcagggcccggcccggagcccgcgccgagggcagcgggcggcagggcggaccccgggggacgcgcggcccggggaaggcggcgcggcgccaccagcggccccccggccccgccgccggccgccaagaacgagccgccggggcggggccgcgggaggcgggcgggcggggaggcggaagacgagcaagagggagggggcgccgaacggaggcgggagccgccgccccacacccacaggcccgagggccgccgccgccgccccggcccgcgcccgcgccaccgcgcccgcggcgaggccgaggggggggacggcccccacgccgcccggcccccacggagccccgagccggaccgggccgggcgggccacgccgcacccccggccggggcccgggccggagggcgcggaggcggcgaagaggggcggcgcgcgggaggcgcccgccccgccgccggccagggaaaccgggcgcaagcggagcggcggcggcggcgggacgggcgggagggcgggggccgcgggccggggggccgggccggggcgccggcgggggcggccgccggcgcgcacgcgggccggagggggcccgagggggcggcggcccgggccccggagaggcccgcccggcgcacacaaggccccgggaggccgcacgaggccggcggccgcccgggagcggcgggagccgggcggggcgcgcggccgccggcggggaaagccccgggggcgagagaaagcgccccagaacaaagcggcggcggcacaggggcaagccgcnnnnnnnnnnnnnnnnnnnnnnnnnnnnnnnnnnnnnnnnnnnnnnnnnnnnnnnnnnnnnnnnnnnnnnnnnnnnnnnnnnnnnnnnnnnnnnnnnnnnnnnnnnnnnnnnnnnnnnnnnnnnnnnnnnnnnnnnnnnnnnnnnnnnnnnnnnnnnnnnnnnnnnnnnnnnnnnnnnnnnnnnnnnnnnnnnnnnnnnnnnnnnnnnnnnnnnnnnnnnnnnnnnnnnnnnnnnnnnnnnnnnnnnnnnnnnnnnnnnnnnnnnnnnnnnnnnnnnnnnnnnnnnnnnnnnnnnnnnnnnnnnnnnnnnnnnnnnnnnnnnnnnnnnnnnnnnnnnnnnnnnnnnnnnnnnnnnnnnnnnnnnnnnnnnnnnnnnnnnnnnnnnnnnnnnnnnnnnnnnnnnnnnnnnnnnnnnnnnnnnnnnnnnnnnnnnnnnnnnnnnnnnnnnnnnnnnnnnnnnnnnnnnnnnnnnnnnnnnnnnnnnnnnnnnnnnnnnnnnnnnnnnnnnnnnnnnnnnnnnnnnnnnnnnnnnnnnnnnnnnnnnnnnnnnnnnnnnnnnnnnnnnnnnnnnnnnnnnnnnnnnnnnnnnnnnnnnnnnnnnnnnnnnnnnnnnnnnnnnnnnnnnnnnnnnnnnnnnnnnnnnnnnnnnnnnnnnnnnnnnnnnnnnnnnnnnnnnnnnnnnnnnnnnnnnnnnnnnnnnnnnnnnnnnnnnnnnnnnnnnnnnnnnnnnnnnnnnnnnnnnnnnnnnnnnnnnnnnnnnnnnnnnnnnnnnnnnnnnnnnnngaccgccgcccccggcggccgcgcggggaacccacaagggccgccgcccccggcgacaggcgccggcccgggcccagagcgggcgggacggcaggacccggcccgccggccgaaagcggcgcggaggggagaaaacggagagcgcagcagggccgggcagggaccagagggaagaaaagagcaacggccacgaggacacagcagggggaaacaaccacccggcggcagccacgaggccgagggggagggggggaagacagccgggcccccagcgagcggacagagagcaggcgcgcaccacgcagacaggggcacaaacggcacggaggaacgggggcaacagacagcgccacccaaacaggccccaggaccgggccggccccggcaaaggaagaagccccaggaagaaagagaagagcaacggaaggggccggaaagggagaagagcaaaggcacccccgccaccccacccccaacccagcaacacgggaccagcagcacccgaagcagcccaaggaacgcgagaaggaaggccgagggggagaacaggagcaaaaccgagaccggcacgcgagcgacaacacggcaaggagaaaaaaacaggaaccgcaaaagaggagccacaaacgagaaacacagggcggacacaaccaaaaggagaccccaagggagcaagagacaagggggaacaagacagagacaaaaacgaaaagacaaacaaaacaaacgcgagacgacaagggaggacagaagaaagggagcgccggcaaggaggccccaaaggagaccaagcagacgccccgaaacaggccagaggacccagggggggaagccacgaaaagccaacaaagggagacaacaaggagaaggcacaggccaaggaaccggcaggccccccccccccccgggaaagcgaagagggacagaaagagcggcccgcaaaacaaaagcaggaaaaaggaacccaccgggacgaagcggaccagcagaaaagcaaaggcacaggcaggaggagggcacacgcaggagggcacgagcaagcgacagcgcccgggggagccacaggggcgcgcccgggcggcacggcgcgccagcgcggcagcggcgcggggagggccgcgggcgcggcgcaagggcacaggcagaaggaagagacagcacacgcccaaggccccggcaaagaagagcccaccaaccaagcaagcaagcagaggggccccaaggggcagccccgaggcaaggcacacaagaagaagagggcaaacagcaaaacgaggggccgcaaccaagggaaacaagaaggcgagagagccgcgggggggaggacagccgagcacaaaggcaaggcaggagggagccacacgcaacgagcacaaagacgccagcgagaacccagcccgccggccacgcccagccaacgccgagagcacggcaggaggcagggcaccagcgaaaacgcggcaaaccannnnnnnnnnnnnnnnnnnnnnnnnnnnnnnnnnnnnnnnnnnnnnnnnnnnnnnnnnnnnnnnnnnnnnnnnnnnnnnnnnnnnnnnnnnnnnnnnnnngcgaagagccgaccacgaaaaagcacgagcgaggaggagaacacacgaaacggacagccgggggaaaacgggaaagaaaggaaaggggacgaacacacgggccgcggaagaagaagggggggggcagggaagaaacgccgaaccggagaccaggaaccaaaacccaaacagagaagaaaaagaccggaccgaaaagggacaacagaggaggcgaaagaaccaaccggagcaacagaacaggggggccaccgaaggcacacccgaagaaagaacaccggacgcaccaggaccccccaagggaaagaggcaaacgaggcagagaggacaggacacagacaccgaggcgggcggagaagcgcagagaaggaaacagaaaaaaaagcacagggcagcacagggcaggcagaaaaaaacaggaggaaaccaaagaaaagaaaaaaaaggaagagcgcaaaacaggaagcgacacacacagagcaaagccaaaaggcaaaagaaagcaagaagcgacgaggacccgagcgccaggaaggaccacaggccggggaggaggaccagaagacaaaacaaaacagaaacaagcaccgacccacaacaggaaaaacgcagagacaagaaaacccaaaacggaaaagccaagcagcacgaccacagannnnnnnnnnnnnnnnnnnnnnnnnnnnnnnnnnnnnnnnnnnnnnnnnnnnnnnnnnnnnnnnnnnnnnnnnnnnnnnnnnnnnnnnnnnnnnnnnnnnnnnnnnnnnnnnnnnnnnnnnnnnnnnnnnnnnnnnnnnnnnnnnnnnnnnnnnnnnnnnnnnnnnnnnnnnnnnnnnnnnnnnnnnnnnnnnnnnnnnnnnnnnnnnnnnnnnnnnnnnnnnnnnnnnnnnnnnnnnnnnnnnnnnnnnnnnnnnnnnnnnnnnnnnnnnnnnnnnnnnnnnnnnnnnnnnnnnnnnnnnnnnnnnnnnnnnnnnnnnnnnnnnnnnnnnnnnnnnnnnnnnnnnnnnnnnnnnnnnnnnnnnnnnnnnnnnnnnnnnnnnnnnnnnnnnnnnnnnnnnnnnnnnnnnnnnnnnnnnnnnnnnnnnnnnnnnnnnnnnnnnnnnnnnnnnnnnnnnnnnnnnnnnnnnnnnnnnnnnnnnnnnnnnnnnnnnnnnnnnnnnnnnnnnnnnnnnnnnnnnnnnnnnnnnnnnnnnnnnnnnnnnnnnnnnnnnnnnnnnnnnnnnnnnnnnnnnnnnnnnnnnnnnnnnnnnnnnnngggcgcaccaggacggagaagcacgacccaacaaggaagccgccaggacccaaaacaaaagaagaaaaaaaaggcaaaggaccggagcgagcgggagaaggcagaaggaacaaagagaaaagaaggaagggcagaggccagaggaagaggagccaggacccccccccaaaagcgccgcacaagggccacgcagcaacgcacgcagccgcacagggggcgcgacgcgccaaaaccgggcaaaacagcgggcccagacgagagaacagggcaaaggcaaagccaggaaggggggggacaagcagaagaaagagaaaaccaaaagaaggaagcaagagacaaacggaacaaaaaccaagagccaaacaggcaaaccagcacagaaaaccagcggacccggcagggaagagcagccacaaagcgacacaagcaaccgcaacgcccggagaaagaacagcacaaaaggaacaccaacgcgaacggaacacaggcggcagagaaagggaaccaaaacagagaaacagccaggggcaagggccgcagagcagccgcccggagccagaagaagccaccagacgcaagagcgccggcaccagaaggggcccaggaaagaaaaaacagcaggcaggacacaggaaggcggcggaaaaagagggaagagaacaagggcaaggcggaagcaaaaagaacaggaggaccggagggacagacggaaaagcagggcaaaaaggaaaagggacaagagcaaaaaaagagagcacgagacgacgccgaagggcccaaaaccggagggcaggggagaccagcagcaaccaggaggcgccaaacagggaagaggaaacagggccgacaaacccagaaaaggaaaaagcagggaccacaagggcagaa

SEQ ID NO: 787 - RNA, 13056 nt, Mus musculus
acgaaagggcccaaacgaaaaaaaggaggcaggggggggggggggggggggggacgcgcaaaacaacgaccagcaaggaaagccacgaagcaaaaaaaagaaaaaaaagaacacacaccacaacggacaaccagggaaacaaggcggcaacagaaagggaaaacaggaaacacagccgcacagcaggcacagagaagcaaaggcacagaagacggaaagagcccccggagcccagggaagcacacacccagagacccacgagccccggccacagggaggggaggacgaggaggcagcaagggaaggcagagccccccccccccccccccccccccccccgggggggggggggggaaacagaagccccacggggaaccgccccagccgcaaaacaaaacacgagaaaggcaccgcacaccgcaaacgaggccagcgccgccaacccaacacacggagcaggccgaccagaaggcggcccgcagaaggcaggacccccgggcccaccagcgggggggaaagcagccagggacagacgacaaaaacgaaaaccaggagggggaaagccccggagacgagacaagcagccaggccagaagcgacacaacgaaaacaggggaagaacacagaccgcccagcccccgggccggaagacagacccgcacaccagcaccgcaccaacaaaggaaaaagacacacacaacaacaaggaacgaggcaaaccagagacgagcagccacccgccaggaagaggcacagccgaggagagaagcgccacccagacgcgcggcagccgcacacgcggacccgaggcgggccagggagcacagagcggccagaaagcccgcggagagacgaagccagagccacagacagaaacccccaagccacggaccagacgcgggagcacacaaaaccgagcccgacacaaaacggagcggcgggagggaccacagccaaaggaaaaaagcaggcaaaccgaaaagcggagaccaaagagaaaagaagagcaagcgggcacagcccggggcggacgcaccaaggcccagcaaggacaaggcaccacgagccacacccaggccccggcaaccaaaaagcaaaccacacaaaacccaaaacccaccaaccaacaacaaagcagcggagggggacaaggaagaacaaacagccaaagaccacagggaccacagaaaaacacacccaggagacacaacaacgcacaaggaagcggaacaaacaaaaagggcgagcccaccaaaacccagcaaccgaaaagacacaacccaaacgcaaaaagcccacgggaaacaaggaaggaacagggacagacacgggcaacagacacggaacacacagaaacaggaaaggcgcacaaaaagccacacaaaccgcaccgacacagcaaaccccgaggaacaaccgacacaggagggccagcgacaccccaggggaaacccaagaaagcaggccggaaacggggagcaggcaaacagagagcagacaccgccaaaacaagagacagggcgcggggggggggggcgaaacaccgccaccaacccaaaggcgagcaacccagacacaaggaaaagaacacgacccacaagccccgacccgaacacacaaaacaggaaaaaaaagcaagccaaagagaagaaagcccgcgcagagagaaccacgaagaaggccaaccggcgggaccggcaggcccaaggcacggccaccccaggaggcgaagggccaaaccacccccccccccccccccccccccccccccccccccccccccccccccccccccccccaagggagccagacgagcaccaggacggggaaagagaaagccagaagcacgcgcgagaggcaagagaagcaagagccagacgcggaacagggaaaggaacggcagaagcgaaaccaagagagagggacgaacaggccccaggaaaacaagcccagccacaccaaacagcaggcccacaggaacaagagagagacgccaaaccagaaggccggcccagcagccccgcacccaccaggagcgacacgggagggagaggggacaggggcaccagggcaggaggacggaaaagcagaaacagggacaagcagacaagacagcagcccacggcgacacagacgccaaaagagacaagccagcacaagaaacagagcccacagagggaccaacccaaagcccgagaccgccccgagcagcgcacaccagaccgggcaggagagagcaacgagacacgggaccaggagaagagaggagagaaaacaaagaaaaacaaggcagcaaaagccgggaggggaagggcaacaggcaggaaagccacacaggaggacagggaagaaaagcaggggagccagggaaaaggcaccgaccaggagggagagcaagaacagcgggaggggcgacgcgccccaaggcccacccccagcacgcaggaaggaaacaggaagagggggaaaccaggagacccagcagcaagcaggcgcggcccgcacagagggccaagagcagcaaaccccaaaacaagaacccaggaaggacagcccgacccgcccacagaaaaggcacgcccaggaaaaagaaaaggggaagccccaaggacccaacaacgacagcgagcgcgagaaaccagagggaccaccagaaaaaaggacagcgacaggccaggagaggaacggaacccccagacccaagcggaaaccccagagcaacacaaaccgggcaagggcgccaaccccgacgcccagggaggggcggcacacaaggcagccaagcaagagcaagagcccggacacaccaggccaccagcagcaggcccgggaaaggagcgacaaggcagccacacagcagggccacgccagagcagacacaaccgcccccacaacaacagggcaagccgaaggccaacaccaaggccaaagcaacaaaccagagagaaacacacaaacgagccaaacacgggccagagacaggggcgggacaggaagaggagcgacggacagaaggacggcgggagcgcagacgggcaccgaggaagcagaacccacaacccagcaagagcagcaagaagaccgaaaggcggacacaaaaaggcgccacaaacccagaacaggacaacaaaaaggaaaccaaaaccgacgcaaccccagcccgcccccggaagcaaagaggcccccccagaaggcccccaaagccccgccccccggagagggaggaaagcaaaacaaggagcgcaacacacaacgggaaagaaagaccacagcgggcaagagaaggacaaccaccgaacacccgccacagaaagaaaaaggcaggaggcgaaaaggcggcaccacaacaagcagaaaaaaaagcccaaaagaccagcgaaaaaggcgaaaacaaaaaagagagaggacaaaacacaacgaacgacagggaaaaaaaaaaaaaagagaagcaagaaacccaacagaaaagggacaggcaagaagggaacagagggagcacaagcacaaaggagcagagcagaaccaaagcaaaccccggcgccaaccggaaagcccagcagcgaagcccaccggccaaccacgagaggcagaagcaagagagaaggagcaacggaccaaacgggcagggacgagcaccccagaagccggaggcaggacgagcgcagcaagacggagaaggcgagcaggacacgcagagagggcaaaggagggcaaaagcaggcacccggaggcgcagggagcaggacgaccacgacacagcccgcacgagaaaaacaccacaggacccaccacaagccaaaagaacacaaacaacaggcacaagaacaagcaaacccccccccccagacgaaaccgacaaaaaaaaaccaccgaaagaacacaaaacaaagaagacacgccacacaacaccccccaagccccaagcccgcccgccacaccaaaacacaccaaagaaaccaagcggaaaccacagcgcccggccccccagcaacacgaagagcgccccgaccaccgccacccaaaagcgaacgccaccccaaccacacccacccccggacgcagagcccaagggcgccgcccagggcaaccaccaccacccaccgacggccagggggccgaaagcaaacgacgcaacacacaaaaaaccccagggacccagccacacagcaggaaacaggcccgagccagccgaaaagacgaaggccgcaccccaccgcaaccaaggcgaacgaggggcacaagaaggcagagccccaggccggggagcgcaggccgaacagccgcccccccaaacaccacacccgaagggccgggacaccgccaagcagcaggcccagccccggaagccaaaacaagcacagcaaccgacaagccaaagaacagggagacccccagccggaacagagcagcgacagcccgggccaagcgccggcagaggagaggaacccacacaggcgaaagaagaaaccgaggcagcggcagaacagcagagccacccgggcagcaacaaagccgagacgcccagcaagacaggaacaaaacgagcacacccggagaaagaaaaagaagacggcagccgaaacgggacaggaagaaaggaaacggaccagcagacaaaaaagaaagaagggggggggggggggggggggcgcgcgcgcgcagcacacacggcagcacagagcaaaaggacgccaaaagcaaggccagaggcggaagagacccagagcccgaaggagacaggggggggcagccaaacagaggcaggaaccaaacaagagcacgggagagcagcaagggcccaacacgagcaccccagcagcccccccacaaggacaaacaaagaaagaaccaacgacacaaaacgccagaacaccccccggccggaaacacaggcaaagccggcccaggaccccaagcagccccccggaccaggcagagcaagcaggcccacgccggcccacaacaccgaaggcccgccacagagacgccacacacaacccacacggagcgagggccgccaccacacacgagcaaacccaagagcaaaaggacaagagacagaacacaaagacgaagcccagcaccgccggaaggagggccagagggcaccccgaccagggccgaaccggagcccgacggccacgaaacagcccaaggccagaggccggagacccccaggccacgccacccgacacagagcagggacacagcaccggccagcacaagccgagacgcaggcaccgcacaagagcaacacaagcaaaaaccaagccccggaccgcccccccccccgagcgcggcaccccccacgaaagccacagaggaaaggagaacgccggggcccaggcaggccagcgacagcacgggaaaacacaccacggaaaccgcaaagagacacgggccccccgaagggcaaaagacacgaggccagaggaaacagacgggagagacaaaaaagcgagcaccagccaagggagagcgccccgaaacacaagagcaccccccaagcacccgcccccgaggccaccccccccagagcaaaggacacagaccagaacgccccacacccggaaacacaaacaccacgacaaccccagcgccccaccaacaagacacacaggcccagcgaaaacgaaaacaaaaaaaagaacaaagccaaaagaaaagagaccacggagcagccgcagcacaaacgcaaacgaggcagcaaccccgagcaaaccgcccccccgaacgaaaacacaaccaagggggaggagaaccaagggcggcagggaagcacacgaaaaggacgagccagcaccccccacacacccacccccaccaccgcaggaggaggaagccaggcccacacagcaggcaaaacaccaaccacgagcaccacccagcaaaacgaagacaaaaaaaacgcacacagacaggaaagagaaggacacaaaaaacaaagacaacacaagacacagggacgaacaaggcaaaaacagaagaagaaagcaacaagggaaaaagaaccaaaccaacaccagcaggaaaagagggacggagaaggcaagaggaaggaaaccagacccagaaagccaaacacaagcccccacgagccagccaaccaacaaggaccccaaagcaagccccgcaagggcagggaccacagaaacacagccaacaacgcgaggagaccagcccagagacacacacgacaaaccccgcaccaagaccaggaacacagaagagggagaaagaccagcggacaaagagagcaaagaggcccagaacgcaggcggaaccggaaggcagagcaggccaccgaacagagcgaaaggaaacaacaaagacagcaagggagaggggaagccacaaaaaccaagccaccaaagaccacggcaacaaagaagaaaagcaagagaagaccccaggaagaccaaccacggcaccaaaaccaaaggccaagggagcccgaaaaaaacaacaagaacaagcagaaagcaggcggagaaggacccccccccgcccccccccccccaccccccaccaccagaccaccacaccaccaacaacaaaacaaaaggccaagggccagaggaaagagagcaaggaggcaggaggagggaggggagcaaaaagaaggagagagaaaaaaaacaacagaaaaaaaaacaaaaaggagaaaaacaacagccccaaacaacacaacccccagaaaacccaaagaagcgcgggaacaacacgcacaggcccaccacaccgggaacaggaaagaacaggcaggacacgcgagaaaaagggacggaccagaccaacgagcgcccacaggccccaccacacaccccgggaccacgagaaaacaaaaccaggcagagagggagcaaagcaagaaacagacaaacgcagcgaacgaaaaaggaaagaacaaaacagaaaccaacagcaacaggccagacagacaaaaaaaaacgagagaaaaagaaaaaaaacacccagaccagaacgaaccaacccgcgagagaggggaacaaccaaaaagacccagaacaaggaaaaagacgaaggagaaaaggaaccgagcaaccagccacccaccaaggacccccagcacccggacaaagaaccaggaggagagcaagaaccaaaagccgggaggcacgagaaaaccaccagcgggcacggagaggcggaacaggaaagggccgcaaacagaagcagccccaacaaccgcggaccagcagccccgccccagaaggaccacgcggaccacacaacacagacaagaacaaccagccaccaccacaaacgcccaccacgaggggaccgacagagccaaaaagacccccaaggccccaggcagcagagcccaaaaagcaaaaaaaaaaaacaaaaaaaaaaacaagaacaagggcgaaaaaaggacaagaaaacagagggcgcacacaccgaacccagcacacggagagaaccaggaggagcaggagcaaagccaaggaacaagcaagacaggccagcaaggcaccagaaagacagaaaaacaaacagaaaacaaacacacccaagacagaaaaaaaaacaaaagcagcaacaacaacaaaggagaacggcacagcaaaaagagagaccccagcccaagacaggaagcacacgacacccaaaaagggggagggagggggggaaaacaccagacgaaacacaaacacagaacaaagaccgagaaacgaccaagaaacaacaccgaccagggaacaagcgggcaaggacagcccccacccaaggcaaccccagccaacccagccgaaacagaacccccagggccccccccgccacacccagggccacacagaccccccaacaacccgcccccgcccacccagcccagcgccagcaggcgccgggaaccacagcccagccggagcaacccaggcagccagccagccccccccccaaccaacccagcccccaggaccccccacccaagaacgagagaccaacacaccgcaaaaacccaaaccaaggacaaaggccaacacaaagcagacacacgagcccacagaagaggaaacagggaaagccaccaggcaaaaaacaaaagcaaaaagccgcagcccagaaaacaggccagcaggcagggacgagggaaaacaggaggcccgacggccccgagcacccggggacccacggacgggcaaaaaaaaccccagaagcggcaagaaaaaagaggggacaggaggagagcacagagaacaacgggaggaaaaaggggggacgaacaagaaaggaaaaaaacaccagaaaagaaaacaggaaaaagaaacacaacagaaaacaaccacaacagacacaggcagacaaaaaaggcaaaccagggaaaacgacacaacgaagacgaccaagaagcaaacaaagacgacaaaaaaaaccccacccagcaagaaggaacagaaaccgaaaagaagaggaacaaaaagagcgcggcccaggggggacgcacacgaggaaagcccagagaagcagaagaggggggacccaaagcggaggcaggaggaggccaggcagaggcagagccacacgaaaaagaagcaccaacacccccagcccaaaagaccgagggcaggaccaaggaacaaaaagcaagggaaaaaacacaccagaaaacaagaaaacagcaaaaccacgccaccaccaaaggcacaacccggagaaaaagaacccaacagcacacaccggaaaacccagagaaaaggaagagagcaaccagacacagccaagaggagagagaagggagagccaaaaaaacacaaagcccacgaaagcccagagagcgaaagaagccacaaaagcgccagccgcacccagacgcacccagacagggccgcccacacaaccaggccccgaggcgcaccacaccacaggacccaaccagcacacgcacaagcacgagcccgggggggaacacacacgagccagcacgaaaagaaaaaaggccccaaaaaaccagaccaacccagccggacggcacaaaaggggaaaaaggggcaaccaaggcaacccgacaaaacagagagaaacgggaaccgaaaggccaaagaaaagggcaaaaaggaaaaaaaaaaaaagcaaagaaacaaggaaggacgacccaccaccacagacaaaaagggcccagccaaggaaaggcgaccccagaaaagaccaagcacaccagagccccaagagaaaaaccccaccagcacgggagccccaaaagaaagacgacaggggaaaaaaaagaagagacaagccaagccgcagccggcacacccaaacacgggcccggaggcaagcagcccccaccccagagaaccaggagacaagaggaaccccaggaagaggcagccagcacacagcccaaaggaagcaaacccagggaaaaagccagaagacacaccaaacccacgaacacagaccaggccacagaagggcgagaacagaagcacaccggcacaaccgaaaacacgggggggggaacagcgccagccagcaagcagagcccagagccaaagccgccaggccggacgcagaaaggccacaccagaccagggagaaggcgagaggacgagggaaccagacggagccccacgagaaaagaacgccggccccggagcggcgagagcgagcacaccccagggcgccaaccagaccagcaagcagagacagcaacaggagaaacagacagaggccccgaagcccgggacagggcaggaccaccagaggggcaccaacagagacaccagcaggaagagcccaacaacgggaggccaccccgccaccggcccagccaaacaaaaagaacaggaaagggcacgcagggggaagggaaccggaagagagaagaggcagagagccggaagaagagaacgaccacacagggaaacagaacccagaggggacaagcaagcgcaggcgggagagagagaagaccaagggcaggacaaggaagaccgcacaaagcaaaacacaaaaggaaagaggcagcagaccccgcagaaaagaaagaggacaacacaccagaaccggagggccgcgggggaggggagcgaaaagaccagaagccggcacgaaaaaaaaaaggaaaaaaaaaagcccccaaagacacaaccaacgacggaaaaggccggcagcgaagccggacgcgggacgcgcggggcaggagaaggcccaaaacagcagcagcggaaaccaaacaacccggagccgcccgccaggcaagcaccagcgaaacaaggacaaagacgaccaacgaccaagcagcagaggaaaaaacgcacgaccaccacagaaacgaggaaaaacgcaacgccaagaacacagaacacacaaggcccccaacccccaccaaaaaaaaaaagggccaagaagacgcagagaaaagcagagagcacgaccccacaaagaaaggcgaacacccaagaaacaaaccaaaaaaaagagaacaggaaacggaagaacacacaagagaccaaaaagaggcagcgaaacccaaaaaaaacagccaggggacaaccccaaggcgcccaggggaggcgcggcggcccaagcgcacggaccaggaggagaggggccagcagcggccaccagcccgggacgcccacaccaggaaagagcacggcacgacacgaccccgcgcgcaagcacgaccgaccaggccccagggcagcgggcgaaccaccgggccgaggggcagggcgcccaccaagaaggcccccccaccgagcccagccaccacccagagcgcaagccgccgcccccgccacgaccaccacgcgagacccgcgcaggcgagcagagcggcagacccgggcgacaccaccgggcgcaggggggggcagcagggggacaggccgcggcaggagcgggggcaggggggaggcacacagggccgccgaccccccgccggcgccgggcaacgaccgagccgggcacgacaggcacaaggaggacgaacaaaggacgcggccgccgcaccgacgaaaaagaacaccaccaacaacaaggggccgcccgcgcggagagccacagaacaaccaagacgcagggaccaccacggcaacgcaccgcggaggcggcacagggagcagccggggggcgcagggagccggcccaagggcggagagggagaccaacacaccacagcgccaagggaagaggagaagagggacacccccacacacacaaacaccacacccggcggaccaggagaaccagccaccagcaggcggcccgcaaggggaagcagggagcagcggaggcagcacaagagagcagcagccgcggcccaaccacccgccagaggaggccaggcgggagggagccccccccccccgccacaccgcagggccgggagagcggaccggggccaagagggagagcagcccccccccccgcccacccacggacaccagaaggaggcccgcacccaccggccagcaacacagggagcagcggcagaggccaaggcagagagcagaagaagaccgcgcgcagaggggcgggggccagccaaagcacgcgaagagccagccgaggaagaaagggagagcagcacgaccagcggccccacgggcccacagaccacgcggggcccacccaaaaccaacacaaaacaggggagcagaggagccagccgcgaccaggggcagcacgcagacacagggcaacaacaggacacagggaggagcccacgaggcaaaggagagcacagaaaccaggacagggccgacgcaaccagcaagaacacgcaaagaagaggagacagagggacaacagggacacacgacccacacagccaaagggagagggggggggggggggggggggggggaggggaaggagagcaagggaaagggcagaagagggcagacagagacgggcgggaagagcaaaccacaaggaaccaaaaagggggaaagaaccgggaaaaggaaaaaaacaaaaacaggcgggacgcggaacagacacagaccaaggcaaccaaaggacaaaaagaggcggcacaggcagagacagccaacacaaggggagcaggcagcaccaggcaggcaggggcggaggaggagagaaaaaccgccaaaggcagcagaagaggcccaggaagcaggagagggcaaagcccacaagacacaccccaaaaggccacaccacaccaacaaggccacacccaaaggccacaccccaaaggccacccgggccaagcaacaaaccaacacagaagagacaacgcagaagagaaccccagcaagccagacccacaccccacacgaagccacccccaagggcagagccgcagaaaggaaacagaacgcaaagcggcccggcaagcgcagggagcagagaaagccaggaaaggaaaaggaggcagggaaggaaggcggccacaacacaaagagcgaagggagacgaaaaggcagagcagaggcagaaaaggaagagacaccgggaggaaacaccacaagaaaaggaagaccggggagagaagaaggccaccaaccagaagaacaacccccggacagggaagcccaaaagagagacagaaaaagagagccaaaaaagaacagaggcccgaccaaaaaaaaacaggagcccaaaacagcgcccacacaaaacgaaaaaaggggggggggggaacggagcgccgcgacacgaacggcaacgggaaaggcggccagccccagcacagcgaggccacacagagacagacgggaggcaaaccagcggagcgccggggcgggggcgaccaccacgagccccaagggacagagaagcgcgcagacccgcagccagcaaaaagccaccgaaagaaaacagagaaaagcagacaaaaacaccccagaagacagcgggacgacagggccaccgggcacaagagaacgccagccagggcaagaaacacccgccaccgacaccacgggccagcggaccaggcgcgcaaaaaccacagggcacaaaagcgaacacacccaaaacaaaacaaacaaaagcaaccacccccccaaaaagcccaaaaagcggggcaaagacagcaaagccaaaagc

SEQ ID NO: 788 - RNA, 14237 nt, Mus musculus
cagacggcaaacgggcccgcgaagacaggagcgagggggaacaagaggaaagcacaggagccgcaggggcagcaaggggccagcaggggccaaggcaggggagagccaagagaggcggagcaagccccgcacgacgaaaaaaaaaaaaaaaaaaaaaaccgacacggggaaaggcgccccagggcacagaggacgaccccggagaccagccccagcaggccagcggggaggagggcaagggggacccgaggccaccagggaacgggggggcgcaggcagaacgagggggggaggggacggggagaaaggggccgggaaggaggaggaggagccgcagggcccagcaagcacaagaggacgggcggaagaagggggagagaagcaagaccacgagagccaggaacccaagacagggccagcgcaagccaagacacccaggacacagggaaacgagccaaggacccaggacaaacgaaaaccggaaaaggaagcacccaggggaaagccagcgcaggcccgacaaccagaacaaacaacccaggccaaccagaacccacagcaaaagaggcgcaaaacaagcaggccggagaggccgcaagaacgggcaaggaggaaagaagaacgggaaaggaaacccgcggacccaaagagccccagggcaggggagggccgggaagggagccaggcccaaaaccagggcagaggacagagccagccagccccacagccccagcaggggcagccagaccccagaaaagcgcccgggagccggcgggggggggcggaggaaggcccagggggcaaacccccagccccagcccccaacccccaggggcccggccagccagggggcgcgagcacgcccgagcaggccggcagagccccaggagacagcaacaggcccgcagcaagcaccggcaagcaaaggcggggggcgcaagagaggaccccaagggggcagccggaggcccccagccgcccacacgcccgaccagacaggaacaacgggaaaaggagagaggggggccacaccccaacgggagacgccaacccggaaggccacaggccccccccggggacagcaagcaccggggccgggagccgcccagcacgggacacgggacaccccccagccccagccccagcacaacccacaacgaccccgaccacccgcccccaaccgaccgcccccccccccccgccccccccccaagcccccaccccaccccagaaagaagaacgaagcaccacacggcccccccccccccccccccccccccccccccccccccccccccccccccccccccccccccccccccccccccgagacagggcccggagcgcggaaccaccgagaccaggcggcgaaccagaaacgccgcccagccggcccccgagccaaggcggagcaggggcaaaccaaccaaccaaagggacaagaagggacccaggcccagcacaagaacagaggaggccgcggcacaagggaggagaggcccggccggaaggcgaaccccaagaggggaagccaggggggagggggaggggggggaacaccaccaaagcagggggaagggggagggaaggggggggaggggaaagggaaaaggggaaacagaaagaaaaagaaaaacaaaaaaaagaagaaaaagaaaggacccaagccccaagagcgaaaaggaggaacccagaccagacgcacccaaggacacgggagcacgaacagagccacggcacaccagcgggaggacgagcagcagcagagcaggaaacagcccagcagggagcacagggggcagaagagggagggcacagcaccgaggacacaggggcggaccccgggagggagaggcccgaacagaacggaggcccaccggggggccacgccgaggagggcccaagaacaagaagcccccggcacaggcaggacaggggccaggccccgccacccccagggggcaaaacaccaagaagcccagcaagggggcggggcaaaccaggcccaggcacagcaagaccacccacgagccacccaggccagccgagcccagagacaccaaggacacaagacgacagcgcccccaaaaaagaaccgcaggagaaagaaagcagacaaaaaagcaacaggcaggggggaggagcgggagggagacccggaacggagacagacaggagcgccagagggccgggaagaacccgggcccggaagaccaagcagccaggccggcgagccaccccaacccaagaaaagaaaagaaaacacggaaaacaggacaaggagaagaaaaaaaaggacccaggggagagagaagccgggacaggcgagcccaaagagggggggcgggggcgggaccggggaggagacacagcaacggaaaaacagcaagaccgaggggaggaccgagcaggggggccgaggagcagaagcgaaaaaagacgcgaaggagaaccagcacaccacaccaccccggagggcaggaaaacagagggaaggacaagaaggagcaacaacaggcaggcgacacccgggaagcccccccgagaccaggacaaagcagggagggaaaggaagacagcccaagggggcgccaaaagcacaggggccgaagacaggaaagggcaaggacccccggcccaaccaggagacacagggaaccgagacacacgggggaccaggcgacagagaaaaccacagacagagggcacaagggagcaagacaacgagccgcaagacccagaaagaggaacacaggaaagaaaaaggcaacaaagacaaaccagccaagcacggcaaaaaagcgaaacaacaaaaagggaagccgaggagaaacaacaacaggaaggagaccaaccagcaggagaggaccaaagacccggagggaggggcccccccacaccaaccccaccccgcccagaaagcccaagcgcacgaccccagcaaagacaggggacaaaagaggcaacccacacaacacagcacacagaaggcaaaaaaccacaagcacacgaagcaaacagaacagacagcaacagaaacgacagcaaaaagggcacccaagggccaaaacagcagggaaggggcacaggagggccaaacagggcaggagagggaggggagcccaagagcgagccacagggacccacaggcagaaagcaacaccaccagacagccagccccaccaccccggcccaggacgccaggcaagaagccacacagaagacaaaaagcccaccagacagcaccacccccgcagaaccgcccgggcaaagccgcgggccggggggaacaaggaaacccagaaccagcgaaaacaaacaggagacgaacccacagagcgccccaccccaggcgcccccccccacgaagcgagcccagacccccggagcgcaaggccgacagacgcaggaacaagaaggcagccggggcccaggaggggaaagagccggggcaccccacccaccaccagaacgcggccgcacccgcagacagcagcacgccacccccagaacccgaaacccacagggccccagggccacggaccagccaggccccaaagcggagacgcggcgcccagaggacaacagcggcagagaaccaaaggaaagcaaggccacgagcccgccgccaggcaggccaccgaacaaaccaggaagaagagaaggacgagacgaagccgacgcaccaaggcacgagcgggaccagaacgggcagcccgccacaggcgacaacagaaggccagcagcaggacaacaggaccaccccagcggccccgcccagagccgacaccccgcacaggacacaacacgccacccagcaacccaaacaggggccagggccgggccgagcagcaccaccagggaggcggcccgggggcagggcgcccgacaaagcccccagccacgaccacaacgccggaagacagcaaggaaggccgaaaccccaggcccgccgaccagcaccgcacaaggcacacccaagcagagcgccggaccccccacacccccgaggcgcagcgggccccgccccaggagccggaccaccaagaggcgcaggccaaagagccccgcccacgccacaccacacagaagcccccaacccccagcaccccaaggaggggaaaaagaacgaaagggaaaaagaaaagagacacaaaaggacccgaccgggacggggccaggaagagagagggcacagggaacgaggagccagagggaaaaaccagggcccacagcgggagaagcagccgggcacaaggagaagcccagcagaaaccagccaagagaccgggcggcgacacccagcccagaacgggaaaccagcccaagacccggcaagaggcccacaaacaacaacaaagaaaaaaaaaacagggagaaaggagcagcaccggaagcaaagccaagaagggcaccgcaggcggcagagcacgcggccgaagcgagagacagggggaccccgcagccagacacccagcgccggcccggcaggagaaaacccgccagaagcaaccaaggaagaaggggcccagccagggacaccccacagcagcgagaagcaaggcagcaggaacgaagcagcagcacaggaggagagccagagagaagagccgccggacgggagcccaggaggagagaccgccaaaaaaagaggagaagagcaggaaaaccccaagacacgaaccacagcaccgaacacaccagaaacacacacacacacacacacacacacaccccaggacaaccacaaaacaaccagcacccaaaaaggccccacacaccaccaacaacgcaggacaggaaaacccaccacacaaccagacaaggggagggcaaaacagcagcagagaagaaggaaagaaaaaagcgaacacccaggcagggggacggcccggagcggacccaacaccacacaggccacagaaacgacagaacacaaagccaagccagacacagaagccacagcaccagagacacagcaccagaacccggcccaaaacccaccaccacgaccaccgcacggagaagcccaaaggaggcagacccaccagacgggaagggaaaacaccagccacccaaggcaaccccccccccccccccccccccccccccccccaaaagaaaagaggagacacgcagcgccagagacaccagaagagggcacagacccaacagagaggagccaccaggggcgggaagaaccaggacccggaagagcagcaggccaaccgagagccacaccccagcccaaggcaacaaagaacaagagaccaaagaaggacagaacccaggggcaaaagcaagcgggcacaggggccagggagagagggagaccccagagaggaacgggcaagcagagacaagcgccagaggaggaccagcggcccacgcaacaggggggcggcccccagcaaagcgggaaccacccagggcggagcacaggaaggccccccccccccccccccccacccacccccccccccccccccccgagcacagcaggaacaagcgcaagaaacagcagaacacgacagagcgaggacacaccagcacgagccgacaaggacgcggaacagagccagaccaaggcaaccaaagaaaaaaagaagacacggccccgacacgcagaagagggagcagaccaacagaggggagccaccaggggcgggagaaccagggccggaagagcagcaggccaaccgcgagccaccaccagccccccccaaggcaaccaaaggacaacaaaggggcggcacaggcagaggcagccaaacaaggaggaagcaggcagcacccggaggcagggcaggaggagcgagaggaaggcgcagggaagacccaccaggcaacaggaaaggacaaagcccacacccacaggccacaccaccacaaaggccaccccgggcgagcaaacaaagcacacaaagccccaaagaaacacaaaccggcagacacccaacccaagaaaaaagaagaccgagcgcccagaacccagaagagggcacagacgaggaggggagccaccaggggcgggagaccggaagaacagcgccaaccagagccaccaccagcccccacccacaccaaccccagacggacaacaagaccaccgaccaagaacccaaagacaagaggaacagaaaaaggccggacggcccaagacaagccccacccacaaaaggacagacccgaaagagcacacgccgcccacacagagagggcccgagacacggacccaaaacagagcggagacggcggagggacaccaggagacaccaggagcaaaagcggcaagcccaaacggaaagaagagagccaaagaccaaccagacaccgcgagccagccccagcccaggaccgccagcaggcgccgaccccagaagggggagagaggccacgagaacacgagaaacccgaagaaagggggagcccacagagagccacagagagccagaagccacaagccaagcccccggaagagccccaccccaggcgggcccaaacccaagaccaagccaaggaggcaccaccaacggcccagccacaaccagacaaagacccacaagagacacagcccaggagggaaaacacacgcccccaaggacagagcagcccccccccccccaccgccccccccccccccccccccccccccccaccccccccccccccccccggcaaggaagggcccagcacgccaaggaggccagaggcaagagggccccgagcccacgagagaggccccacaccgagcaccagaggacagaccccagaagcccaggggcccacggcgaccgacacgaggccggcacaacacaaccaccagcccggccggggaacgaggaacaaacaagacccacacagagagcaggcacacaccaagcccccccagcccagcaacaaaaaacaaacagagcaaacaggcacccggcccccccccccccccccccacggcggcggcagccccaccccacagcagagggaagcagaagcgcccacacaaccacagacaccagcaccaaacagaaacagggcaacccgcccgaagcccgcccggaccgcccgagcaacgaggaaaacaaaggacacccaggcccgcccaggcaagagcacccacggcaggcaaagaggagaagagcgagcccagccgcagagaccagccgggcgcccgagcagcagaggcgccaggaaaaacagcaggcccgagcccacagggaacggcacagagagaggcggaggccggagagaaagaggcgagaggagagggcggagaagcaaaggaagaaggcgggggggggggggggggggggggccgcgcagggaggaagagcacaacccagcgggaagggcacgcgacagacaccagaccccacccagcaacaacaaaacagcagggaaaccgcacacgcggggccggggcacgggagcgagacacgaggcccggaggggcgccagagccggaggggaagggcgagggacaccccccccagccagggaagggcggcggggcggccgggcacggggcacaacggcacaggcaggacagccgggaaggcagaggaaaacacaaaggggcacgagcagagaaaaaccccccgccaaaagaaaccgcgggcagggggcgcagacaacccagcacgagaggcagaggcaggagacgagcgaggccagccggcacagaggagccaggacagccagggcaacagagaaacccgccgaaaaaccaaaaaaaaaaaaaaaaaaaaagcaaaaaaccaaaaaccaaaaaaccaccgaaaacgacaaaaacaaggcgacagacccaccccaggccccccccccaccacaaggacccccagcacccccacagaaggcccccaccacaacacacacacacacacacgccacacacacacacacacgagcacagcaagcacagacacagaacacacagaaacacacacacagaacacaaggcacagaaacaggacaacacagacaacacacagagaacaacacacagagagagacacacacaggcacacagacacaggcacacagaacaaaacacagacacaacacacaagagaacacacacacacacacaggcacaacacaaagaacacacacacacacacacacacacagaggacgacggcagaagcacaggcagagagccaagggcaggccagcggagagagacagcaccacagcaaccccacgcagccagacccaaccccccacaaagcccgagcccggaggcagggagcgcaggcagggagcgcagcagaccgccaccaacaaagaacacaacaacacgaccagaggagacgaaccagaccaagcaaagagaagccggcaaggggggaaggcagaaggacagagaaaacaagaaaaggaagcaagaacagccacaaaaggcaacagaagcgaccccgcgcccgacccagagccgcagacaagaccagccagaacaccaggagcggccaaacaaccagagaggggaccccaaaccccccaccgcccgccgccggcggaggagagcacgcgggcgcccgggaaaccgcagaggaccccagagcccagcaccggcacggacacgaggaggacaccagcgacagaggcgccaacgcgaaaaccagacagcggccgaaagcaccaggacccccacacccgagggagcgggggaaaagcccccacagcccacgggggcggggaaaagcccacacacccacacagcggggaccaacaaaccccgcccaagcaagcccaccaaccaaacccccccagaccccgagccccccaagggcgcacaacagggggcccgccccggaggcccaccgcaaaccacaagggggaggaccaaggaaggaagaacagcagacggccccgagccagagcccaggggccccgccagggccgaaggaagcccagggagagaagcgacagggggacaggaagagcaggccagccagggcagcagcgcgagagggccccgcccccgccccccgccccccacccccagcccagccaccacacacacaaacccacacccccggcgcccgaacgaaacccagaaggccccgaaggaagaaccagaggcgaggagacccagcccagagcagcccagcagggcacagggaggagggaccggcagccgagcaggccgcacagccgagacagggccacagagcccggcaccggaaccacagcagacacaggcggccgccccgaggaggaagagggcaccaccacaggccgccagcgagccgcccccagcagcccggacacaggaccccgagggcgggccacaccaccggcccacagaccaggccggcaggacccccaaggaggggagggaagaaagcccaggccagagaggcaaaaaacgggaggaagaggaaaggcggagaagacaggcgccgggggacacccgacggcccagaggaggggggcacggagaccccagccccaggaaccccccccccccccccccccccccccccgccccccccccccccccccaccccgcccaagaggaaaaaaaaaaaaaacaagcgacagcaccagccccagaacaccagaagagggcaccagacccaacagaggggagccaccaggggcgggaagcaggggccaacgcgagccacccccagccccccaccccccaccccccaacacacacacacacacacacacacacacacacacacacacacacaccacacacacacacacacacacacacacacacacacacacacacacacacacacacacgaggccggggaagccgcagacaacacgggccgagccagggagggcacagaccccggaacagagaacagagggaacagacggggcgaagccccggaagagcagccacccaacgcgagccaccccgccggcaggcgccaaacaccccgaccaccagcacggcacccgccgcggccccgggaccaagagggaggacaacggccaaggcacagacccggccggaggcacgaaacacagggcgcgacaaccagggcaaagaggacaggcaaaagagcaggagaaaaacgggaaaacaggaagcagaaaacgggcgagggaagcgcaggccaaggagaggaccgccggaagcgggacaaccagcgcaggcccacacagaccacaaaacacccggaacacagagagggaagggaaaagacaaaaagaaccgaaagaagagccgagacaagacagaccagaggaggacggcaggcagggagagagaccagaagcccggacacagccagggagagccgcggcggagggcaaacacagggggcaggggggagacagggccaggggaaaaggcgcacacaagagagcagaccccaggacccagaaaaagccaacggaagcagggcccacaaccagcacgggaggcagagacagggaacccgagcgaggccagccggaagagaagacaggaagccagggaagcagagaaaccacggggggggggggggggcgggggggagacaacaggcacaagacaaagacaacagggggggaacaaacccggccacacagacacaacacagaacagacaagcaacagacagacagacacacacacacacacacacacacacacacacacagagagagagagagagagagagagagagagagagagagagagagagagagaaacagacagagacagccgaggcggaccccagagcgcggcaggaagaaaagcgggcaacccaggagaggaggcaccccagaagccccagcaccacccagggaacagaccccgggggggggagggcaagaaggagaaagaagggaagcacgccgcaagcaaaaaccccaagcagcagcaaaacaacaagccacgcccaccggcgagaacggaacggcaggcgagcgggggcggccagcacccccacacagaggagcaagccaggaggcaccaggcacggagggacaggccgaggggcgccccaagacccggggcgggcgcccagagccacaagcacacacagggacagcagaggccagacaggcaacccgggccccacagcgaagaccaaaaaacaaacaaggggagacacaccaccccgcgagccagacaaacacacaaggcgggcacacgggaggacagagaagaaggaagcagcccaacaggggccacccggggggcacccagcaaccgccaggaggaccaaagagcccaagaagaaacggggggggggggggagacccaccggaacggggcagcccacccaaagcgagcccagcgcacaaaagggaaagcagcgagcccagacacgcccgcccgacgggacaaagcaaaccagccaccacaccccgcgcacaccagaggacgcaccaaagggagccaaaagaaaaccccgaagcggaaggcaacacaaccaaagaaaagaacagaggggccagcggaagagcaccgacgccccaaaggcccagcaagcccagcaaccacaggggccacaaccaccgaagagaacgaccccccggaggcgaaagacacaaaaaacaaacaaacaaacaaagaaaagaaaagaacaacaacaccaggaccaaccaaccaggaagaaaaacaggaaaaaaaggcagaaccaaaacacagaccgcaggagggaaacagcacgagacaggagcagggaggaacgcacaaaccagagagaaaagcacaagggacggcaggccagaagcagggaaaacacaggccgcaacaaaggcgaacacgggagcagaacaccgcaaagaggggacgggggaggggccaacaagcgggaggcgaccccaaagggcgagggggggaccaagaggggagccaagggaggcggcacaccagggacgagcaagggaagcggcccagggagccggaagagagaagagcaaggaaggccccaggccccaaggaaccccagacggcccgccgggcggacacagccaaggcccaccgagggaccgaaggacaggacgccaacggagccaaccccaaccgccgagcaaaagaaaacgaccacaggagaccggggggccgggggggggggggccgggggggccgggggggccggggccgggcgccgccgccacaaggaggccggaggcagaaaaggaggagcccggaaccaggcccgggacgcagacaccaaaggcgaaacagccagcccaaacaaacaaacagggggaaacagggcccaggaacacgaccgagccccgcccacgacaccacggggcagggccgaacacccggcaccggagacaaaccacaaaaccggagaaacacccgaagggggcccacccacgaaagaagcggagacccaggagagacaggacgggaaaaaagaagacaggacgacccgcccgggcacacagacccgcagagcaccacgggggaaccagacacagaaggaaccacacgcaaaggcacggcggaaggagcacccagagccaaaccagagaacagagaccacagagacaaagaacggacccgcaagaacaccacagggaaaagaggcgggggcagcaaccgcgggaccgacagggaacccccgcagcccaacagaccggaagacacggcagagccaccaagggcacggcgcggaaggacagccaaccaccagccgagcccagcccgggagcaaccaccccagcaaaggcacaggaagagacgaaaccagcaaggcagaggcgcgaggagaaggcaagaggaaggaggccggggcacgaaagaagaacaggcgaaagaagggagcccccacacaaaagcccaacccaagaaaagcccagcagacacgggaagaaacccggaaaaacaagcaggacaaggaagaaccagcacccaggagaacagacccagaagaagcaagcacccgccgaccaaaagccaggcaagcacagagggagagcccagcagggcgcaacaggagaaggcgacaccagccgcagcgggagaagcccaggaaaccccaacaggggacagaagacaaagccaaaggcagcgcaggacccagcagaaccaacagaccaggaaagacaagccaaggaaccagcagagcgacaacaaggacaggggggacaggcaaccacagaccccccagggaggacagggaccccaccccacccaccccagaagaggcccgcagcaggccacacccagaaacccgaccagcgggggaggagacgggaggagccggggccccgcacagaccgcagacccagggagggcagaggaggacagaccgaccccacacggaggacagaggggaccgcgggagaacacgcgggaaccggccgcagacagagggcagaaaaagaacgcacaggagcaagggcgggagacaacagggacaaccacgcgcacggggcgaccggagagggagggccgagcccggcaaccagagcacgcaacagcccggcagagacagcagacacagggccagggccccccgccccccccagggcccccacagaacaaccccggacagaagcccaagggagggccaagagaggcaggcagaagcaagcagagaagaacggaagcgaggcacaccgagccaaacaaggaggccaagacggccaggagaaaaagggagggaaaagcagggcccccagccaccgagcagcagggcaaacacaagccgccggccgcagggccaacagggaagagcaagcagcggaaacgcccgaagccaaaggagcccccggcaccgggcggacaccacaccagcacaaacaaccaaggagaagcggaaagcggacaaacaaacaaacaaacaaacaaaccaaccaaccaaccaccaccagccacgcagaggcacggaagccaccagcaaggagccagcggccccggcggcccgggaaggcacagggaaggaaaagagcacaaaagaccgccgcgcccgaggagaggggagggagaggaagagaggccaagaagaggaggccaggggggagagaggccagggaagagcacgacgccccaaaggcgagcaaacccagcccagcaaccacacgggcacaaccacgaagagacgagcccccggggcgaagacagcgcaggacacaaaaaaaaaaaaacaaaaaaaaaaaaagaagaagaagaggcggccagggccgaaagaccccacacacgggggggaggggggcagggggggggcgcagagaagcagcaccaacaccacggcccaggcgcccaggcgcgccacccccagcagaacagcccaaggaagaccccaagccagcacgggc

SEQ ID NO: 789 - RNA, 734 nt, Mus musculus
gaaagaaagaggggaccagaaaacacacacaaccaggaggagccaaagggcaaaaaccacccagggacagcaagaccaagagacccacgcaccacgccaagcagaagaggggaggacggggccccaaagacaggagaagcacagagcacccgacaaaaccaaacccggagaaaacaaccgagcaggggagcgaaagaaacaaggaagcaagcacagggggccccacagacggcgcaccccgcgcagcgaagcacacacccaagcaggaagcgacacacaccccccaagcagggaccccaccgccagccccggaccccggagccaaagccccagcagaaaaggcgaagagacagggggccgagccgcaggaccgagggggggcacggagcgagagcaggcagcgccagagcacgaccacaagccgcaagcagccgcgcaaaggaccccaggacggagcggaaacgcgacagaagcaaaaccaccagagcaccgcagcgagcacccacaaaaaggcaccgggcgagaaaaaaacggagaaagacaacgagaaaaagacaaggcccagaagcaaagaggcacaaaaaacgacaaaagcagagcacacaggcagccacaggcacgccaggcggcggagagccgccgccggccccgcagggacaaccaccacaccgccgagcaaggacggccgcaaaaacacaacaaacccggaagaaaccccagaacacaaagaaaac

SEQ ID NO: 790 - RNA, 1443 nt, Mus musculus
ccaaccaggcacaacacagcaaccacgcaagaggggggaaacccacagaaggaagggaaaacccacacaggagcgccccacccaaggggcccccaggcgccaagcagaggaaaaagggggccaagacagagcggcagcaaacgccaaaacacacacccagcccccccccccagaccccccaaagcacccccgccccccccccaagaagagggagccccccaccaggggcaccccacccgacacacaagcacgcaagacaggcaaccccccacccgccagaaggcagacggaaaccaaggacgcccaagcggccaaccaaaaagagggcagaccccaaggccaacgcaacgcagaaagacaccggacaacccacgggggccgggcaaggcagagagcacgaagagagaaacccagcccaggcccaacggaaagggaaagaaagcaagcgaagcagcaccgcccgagcggggacaaccagcaccacacacccgcgcccccagcagacagacggccaaaacggagccaacaaagcgcccccccccaggcagccagaagacagcaagggaacagcacaacccccgccgcccaccgaaggcagcaaccagcaccggcaacgcgccacaaggaacgccccccagggcgacaacgcccccccaacaagagcaccagcaccgccgaaccaccaacgaagcaacggccaagacaacaacaagacaccggaacagaacccagccagaggccacaagaggccagcaaaggggggcgagagacaaccagaggcaccagcagaggacacccaaggcagacgcccgaggaggcagacaggaagccacaggcagcaaggagggcgagggaagagccggagccgcaagcccagaagggggacaaagccgcacacaaggccagagcgccgcaagacgaaaaaggggggggaagagaaagaggcagagcgggaggaagaaagaaaaggagggaccggcacaaggaccgacaaacaagcaacaaaaaaggagccgaacgagaaaacgcccccgccccaacgggagacaagcaggaaccaagacagacaacgaaggggaccggcgggacaaggcgcaacgagcaccaccccgcaaggccagcaaacaggaggcacccccccccccccccccacccccgaaccccaccagccaggaggccgaagcaagcaccgcggaaaccgaacccgaccccgcccccccccgaggcgggaacagaggaccaccagccggagaaggggaagcagaaccaaagagacacagccgagggaaggcaagacccaaggagggaacacacaaccaaaagacacagggagccaaaagggaaaccaacccgcgaggaggagcccaagggaccacagcagccccggcaccaacagcgcaaagacgggcaaacagcccaaacagcaccgagggacagacgccc

SEQ ID NO: 791 - RNA, 72055 nt, Mus musculus
gcaggggccaaacccaacagccccaaggcgagggaaacagacacacaagaagcaggacaaacccagggacagcaccaaacggggcggggagaacgcagagccagccggacacccagccgcacggacacacagcaaagacgacaaacaaggccggaaagaagacaaggcgaaacagaaggacagccacaaggaagccagacaccagaggggaggcagcggcacacgcaccgcaaccagaggcagagagaggagcggcgccggccgggaaccagccaccgcacacagcgggcccacacaagaacgaacagaaacccagaacccagagaggcgccaggggacagacccgccaggacagcaaagcaccagccggggaccccacgcgccggggcgcgccaggcagaccgcacccgggcacagggacgggcacagggggcaggcaaaaaagcaacccccccaaaagaagagaagggccgcaagccgccgcgacgcaggacccagccccccccaccccccagaccgcgccccaccagcccacaaccagccccccagcggggaggaacccccacagcgccggagggcgagagcacagaccagaggcaggcgaagacaggagaaggaaggaagcacaaacaagacagcgcgacgccaaaagcaacacgcacgcgaggcgaacaccacccccgcccacccaaccagaagacggaccagcccaaggcaggcccagacccgagacacccgggcacccaaacagacagagagccacacggccagccaggacgggaggacagagaaggaggggaccagaagcaaggagagaggcccccgagggcagccacacagcgcacccacccacaccccacagccgcgcaggcgcccacagccaggcgacccgaagcaacggcacaggcgccccccccaccacccccgacccaccgcaacggagcgcacaaacaaacaaagcccaccaccccccagcccccggccagccaccgacggaaagccaagcaacgacgggcaaagaaacccagcaacgaccaggagacgcggcgggcgccccaaacggagccgcccagcgacccaaccaggagggggagggcagacccagcgaagcgaagccagaacagggccgggccccgcggggaacaggaccccgagccagacgcccacagagacggaagcacgaagcggggagagcgagcagcaaggcgcggccaagaggaccgagaaccggaagccagagaaagccaggagggacgccagcagccagcacgggagaggagaaagacacagggggggggacaggaagccgagagcaagccggaaggccggggagccccgccaaaaaagggggggaggggagccaagggccccccagccacgcacaaaggaccacacaaacacacaccacagcagacagcaccacagcaaaacaagaacaacaggaggaaacagagacaccaccacccccaaaccaaccaccgaggcaccacaccaagcccaagagcgcacgcacgccagcaccggggagccaccccaccccacacacccccacacaaccccaccccaccccaaccccagcagcgacagaggcagcaaaggcgcccccaaaaaaaaagccgaagccaacaaaaccgggggcgccagccgggagacagccacgacagccgccccgacacgagccgagcgcccccaggagagagcaccggccaaagggcggggccggccacaaccccgcccaagagcacagagaacaaaagaggaaagggcccaggccccagcggacaggcagacacaggagagccaaaaaaaggacacacggccaaaggaaggaccaagaagaagcaaacgcccaacaaacgccgggccgaaaaagaccgaggaacagccgggaaagaagagcagaaaccagggaacaagaacgggaagggggaagaacggagcagagagaccaagaaaaacaaaagggaagagcggaaacccacaaaggaaaggggaagcgcgcaagacagcccaggagggacgccgaggcgcggaaggccgcccaaagccaaggagcagcagaaacgcggccccgggcgcggcccaccaagacccaggcccaggaagggcgacaacagccggggccggggacaaacacagagaggagcagcagccacaagacacccaaaggacaaagagagaaaaaggacgggcagagcaaagcggaggcagaacacaaagagcaagcgagcagacagcaggcagcagaggcgcacccagagacaagggcgggggccgcacagagaggcaagaccagccacaggcggacacagagcacccacaggacagccacggggaaaaagggagaccaggaggccacacgacgcagcaacagacaagaccaagccgaggggagagcagggggggcacagcacagccaagagaaggaagcaagagaggaaggggggaggggggagggggagcgggaggacacaaagggaccagccagcccgcggagcaggcaagccaccagaaccaaagacaccgaaaagagcccgagagaaagcccccccccccccccccccaccccccccccccccgggggggggggggggggggggaaacagacgccagagaaaacaccacagccaacacggcgccccccagcacagacaaggccacgacgcagacacaacaaagaacacgggacagaaaacccgggggggggccccaccacccagggcgggaacaaagagagcggcggcaagaggcgaggaccgcccagcaagccacagacgagcacccacccccaacccccaagccagcgaaccccccagcaacacacaccacgcaagggagaaaccaagagggccccaaacacgaacacaacaaagaagccagagccccccaaggggcggcaagaaacaccacagaagcaaagcaaaccaaagaaaaacccccgcacgggccaagacacgaaggaagccgaaacacgggaaggggaaaacaaagagcagaacgagcacggcgggaagagaaagagaagccaaacagcgaacgaaaggcggcacggaaaagccagcagcgcgcagggaacaggagacacgacgcaccggcccggcaaagccaggggccagcaagacaaaccacgaagcccaaagcccagaacacgccgggggacagaggcgcggcgcgcaagcaagcaagcaaccaaccaaaccagcaggcagaccaagcacaaagagggaaacacagagaaagcgggagggaccgaaaccagaaacgaaggaccagagcacaagagaagacaggacaggcgccgggccacaggaagagagaccccaaacagaagggaccaaaccaaacagcaggccgaacaaccgccgacaagcacccacggggccccaggcaaggagcccagaaccaacaacagcaggagcggagagaggccagcagaagagcacgacgccccagaggccgagcaacccagcaacaggggccacaaccacgaagggacgagcccccggggcgaagacagcacaggaacaaacaaaaaaaaaaaaaaaaaaaaacaaaaaacaacagcaccacaaacaggaggacccaggagaacagaaaccagagcaaggaagagccacggcccagaccccggccgggaagaccacccccagaaagagcaaagggaccaccacgcccaacaaaagacgcaccgaccgcgcagagcccagagcccccaccccccaaaaggccccacacacacccccacccagagcaagaagaaggaaagagcaaggcaacccaaagaccaggggccgcagagggagagagacagaggcagcacaccaggcgggggaaggaaggcccgagccgccaggaaccaggccaggcccaaaacaaagagccaggccagagcgggaagcacaaccgaagccaaggccggccgccaggagcaccgccccaacaggagcagaaggggaaccagccgagcaagccaggggaggaaagggaaacccaacgagcaagacggcggacaacagaaagaaccgagaccccacagcagcggaacaggaaaaccaaagagacaaacgaagacgggaaccagagaggggagaagacccgggcagacccgaccgccaggagacaaacggggggcccagagaaaagaggagaccgagcagggcgcgaaggggaacccaacaggcggggcacaagaggccagcaaaacagaaaccaggaaaggcaaacaagagaaggaccaggaccacagagcaggacagcaaaccaggagcggcccagcaaccaggaccacaggacgagccgacagcaagcgcaaccgaaaaacagggaagccgaaggagaggcgcacagaggcagaacagggcccggggagacaaagcagaaccccccagagcaaagcagaaaaacccaggcaaccgaagcgagaacaaaggagacaggaaggcaagcaggaggcaacaagggagagggccaagcacacaaaacagggaccggcacccacaaccgacaggagcaggccggaccagacgggaagggaggcaaaagaagaggaaccgaggcacccgggccacacagggcaagagacaccaacgcaaaaaaaccaaaccaaaaaggagaaggaaaccagcagaccgaggaggcagaccgaggacggcagaccgaggacagaggggccacacgcagaggaacagcaaaagggcacaagaagggccaccccagcagagaaaaaaaggccggggaggagggcagagcggagagaagaccaggaagcagaggaagccgcaaccagcaggaagaagaacaggaccagaccacccccccagcaggggagacgccaggagcaggggaccccaccccaacggaagccacccggagggggcgaccaaaccaaagcacacgacacaacaaaaccaccaggagcaccaccccaaggagaagaggcagacacagaaggaccaggaacagccagagcaaagggagcaaccaggccggaccggcaaaagaacacagaggagggaggggggagcaaagaacgggggagaacaagaaggccccaaggcacaagaagcgccaccagggaaggaacgaaagaagagccaagccccaagccgaccaaacagccaggcaggaccccaaccaaaaaacgagcacgaaccaacgcacgagagcacaaagaaacacgaagcagacacgacaggaccccagaaagggcacaaccccgaaggggcagacccacagggagaacagcgccagaggcaggagaccagggggaagacccccccaaaacagccacgcgacccaggacagagcgcccacacaccgacaaacacacggaagccaaacaaagagaccacaaagggcagcacacgcacgggaggacagcaaagccgcggacgccacagcagcagaggagccagccacccccacacaggagcgagcaaaagccgaaagaagggaggcacgcggggggaccccgcagagcggcgccaagacacccaccaccccgcccaccccagaacagcgcccagaaaaccccggccaacccgcagccagccagcggccccgggcccacacacgcccgccggaaagggccgggccaaccggcaaggacccgagaggaaacaacaccccggagaaagccaggacaagcaagccgagcccgacaccccagaccagcaaaccagcgcaaccgcagaccccgaaaggaagccagcagggaaaaaagaaagacaaggaagaccagcacaaacggagggaccaccagacgcagcaagcaaggcagcggggcgcagccaggccaagccccaacagggaggcccggggagcagcacaggaaagaaaaacaggagaagaaggacccaggaggacaggacaccaggaccaacagacaacaaggaccagggagccacacgccaaagaaaggggaaggggagcaggcagcccaagggcacagagggacccgccaccccagagggagcccggaaaggaaggcaaagagaaagaaaagaggccgagagcgaggggggccccaggaagcggggaaaacaccacccacacagccgggcgggcggaccaggaagcccaaaggcagaggccgcccacacagggcaggacacaacaagacaccgcccgacgccccccaggagcgcccaaggccacgggagggggggagagaggaagagaacaggaaaacccagccccgggcggcccgcaagaaaaggcccagcgaggcgacggccaacagcccacacacagaaagagagcaaccccacaggcaggcacagagcgccccccaagagggaaaacagaacaggggaggccccagacccgcagccaggcaggaagggaagaggccccgccaaaaaaagaaaacaacagaggcacgcgcgaaacaaagaccggaaccaggcggcacccagcaccacacagcaccccaagggagaacaggggcaccaccagcagcagccaaggaaagagcgagaacagacgagagcgggccgcaagagggagcaccaaggagcgacacgcgcgaagaggcagagccagcagagcaagcccaccccaggcggcccgcagcacccccccccccgcacagacaacacagcagaggcccccagagagccacacggaccgccccagaacggagggaacagaaaacgcagggggcccccaggagaggggacaccgcgaaagacaggcgcaccacaacaccacaaaacagcaaccccagggaaaacaccagagaccagaaacccaccccaaggcacagagagaagcagggacacccaggccccggaccggcagcccagggcaaagcggggagagacgcagcgcccacagggacagaaccgcccagggcaaggagcacaccccaacccagcgcagcaagagcccgacgagacgcggaccaacacagcaaaagaagaacaagccaaagacacaaacaaagcaggacacggagacaccagaaaaggaacggacaccgcaagccgccccgcagagagggcaagcaacccaggagaacaacacagcccaaacagaaccgcagcaaacaaccccacgggcaccagagcccccgggccgcgcagaacgcccaggaaccaaaacaccacccgaagcccacagcccccaccccacacaccgccgggcccgagacagccccaccggagccccgaggccaacaagaaacagaccaggggggcgagagggcagggaagagcgcccccagggaaccaaacagacccagcacccacacagggagccacaaccccggaaagggccgaaacaagcaaggcccggggaaccgcaccaggacaacccccacacagacaagaaaaaaaaaaaaaagagaaacgacaaaggaagaggaagaagaagaagaagaaagaaaaaacagaaaagaaggagcgagaaagccaagcacccggagaggggaagccagcaagccggccccggggagcaagggaaagaccgggagcacaaagggcagacggaaccacagccgagccacgcccccacagcgaggagaaagccggccaagcgcccgaagggagaaagcacaccgcccaagccgaagaccaaaacaaagaaaccaaacacagagagcagggcacggcgccggcacgcagaacggcagcagaaagagaccccagaaaacaaaaaagccagggcggggagcggccagcgaggaaggcacaagaaccaagcagaccggcacagaaagagggacggggagaacgaaccagcacagagggcaaagacaggggaccccaggcaaaggaaccagacaccggaagggagccaaagggaaaaaaacaaaaaagagagagcaagacaccagcacagccagccccacagcacacacacaacacaaagcacacagcacacacacaacacacaacagaaacaggccaaaacggggacagggaacgcacaaaaacaggaacaggcgaagcaaagcgagaagaagccggagagcaggagccccagagggaagaagccggagagcaggagccccagagggaagaagccggagagcagaagccccagagggaagaagccggagagcaggagccccagacggcagccggaccagcgccagacaacacaacgaagggcggacaaaaaaaacaaaaccgaaagaaacacgggaaagccaccaacaacccgcacagcgcggcaaagaaagccaaagcgggacagaaagaaaaaagaggaagccaagccgggaaagggacaaggccaggaaggccggcacacaagagaaacacaaagagaggaagaggccagggaggcaggaagccaaagggagagaggaccggacagacccacccggaggaccaaaagaacacggaaggcccaaccgcgagggaaggcccaggaccgccaacccaccggcaccaagagccaccgacccaaaccaccggcaagagcaaggcagagcagagccgggagcacacaggcaaaaagcagggcaggcggaaggccggagggccccgcccacccgaggagagagcaagcaagcacccgggccacgcgccccaaccgaagcgccaccggcccgagaaagaagaagagaggaaaggaggccgaagcgggggcccgaagcgcgcaggggcggcagcagaacgcacaacccaggcgaacccaggaccaggggcgcacaaaaggacgcagacccagccccaggccggaaggaccagggaaaaaacaaaaagaaaaaagaagaggcgagcggagacacacagaagaaggagcagaccaagggggggagccaccaggggcgggagaaccaggaccagaagagcagcgggccaaccgcgagccaccccagcccagaaaaaaagagaggggacaggaaggacagaaaggcccgggcggcggaccacacgagacgcagcccgcagcacaggaaggggggagcacacaggcagacacaagcggggaaggacgcaagccaaggcaccggcccagcgggaagcggcccgcgaccggacccgacccagcagcaggagagaacagcccgccccagcccccaggaaaacaaacaccaggccacaaccccgcgaaaacaccaggccaggacgcgggaaaaaggacgcagaaggaccaaaggcacaggccaagaaaagaaccaaaaccggggggaaccgaagaggaagcgaaacacacagagcccgccccaggagacccaaggaagaaaaacaggaccagagagccgaggcggaggaacaccacccaggagcaagccaaccgaagaacccaaacgagcgccacaggagggggagacaaggcccgccgagagaagccaggacccccacgaccagcagaagagacaccagaaaaggcaagaagaaggaagagaggaggcaagcagagagagccagacgagaggggagcaggcagacaggcaaggccgggcggagcagcacgagagcacaagagacaagaaccccaaggaaggcaagagggagagaggagcggggggggggggggaggaaaaagcccaccccaggacacaccccccaacaaggccacaccccaacccccaaacagcaccaacgcagaacaagcacaaaaagagccaggaggccagccccagagcaccacacagccacacgaagagaaagaaacccacggcgggacccccacaaacaacagaacgagcgcagcacgaaggcaacagcgggagagacaacaaagcggggggggaccacagaagacagcagccccgggcagacacccagagcagaacacaagaagaaccacgggagcacaggagaccgaggcaccaacgagcgcaaacaaagggcaacaaagcgacaaaaggcaggcacaaggcgacacaaaaccgaccagaccagaaagcggggcaggagagagaggcccagcaaaagagcacgagccgagaggaccaggcagcccagcacccacaggggccacaaccaccagaacccagccaggagaccaagccccgaccccacaggcaccaggaacaaggagggacacaaagcggcaaagcacgaaaacaaaagaacacacaacccaaacacacaacacacaaagaaggagaagggaaaagagaaacaagaaagaagaaaacacaccacaaaacaacaacaaaaacacaaacacaaaaacacacacaaaacacaaacacaaaaacacacaaaaaacacaaaacaaaacaacaaaaaaaaagaaacaaaaaaaagaaacagcaagacgggggggaggcacagagcggaccaaaaaacacggagcgagcagacagagacccacagagccaacaggggcaaaagaaccccccccggagcaggcaggagaaagccaggcccccacgcggggcaccgcaggcgccaacaagaacaggccagcacggaacacgcgcgcagcacgacaacccaggaacagagggagaaagaaggggggcaggagcagcccggccacggaacgccaacacgcaaaacaagacgaaagaaacagcgccacagcagcgccccacacccacaaggggccagcccccaggccacggaggaagcgaggccaggagcggggcaaaccccagaccccgagcagaacacaaacaccggaaagggagaggaacggcacacaaaccgagacccgcgccagggccaaggcaaaggcagccggcaacgcaaaacaggcagagaaaacaacaaaagggagccgacaaacggccgaaagcaggaacagacgcgacaacaggaagaacagacagagcaaaagccaaaccgcccagaaagggcaggagagcacccacccaggcaccacgcgcaaaaacaggggccggacgacagaaacaacagggcagaggaggcccacccaacacgccccgggggggaaggccgggggcagaccggcggagcccgcgggggcaaggcaaagccgggccgcacacggcgacaaacagggggaacggcaagcgccgcacggcggcaccccgaaccgaaccacagcagcaaaaggaaaaaagcgagcagacccaccggcaacggacaaagagaggagggcgcccggcccagaaccagagggagaagcaagccacgagagaggaaacaggacgaaagagaggcggacagccggaaagcaaacaagcaaagcagacgcacaaaggaaagacagagggaagacacggacgcgaggagggggcaaaggaagccacacccgcgggccaggaagacccagagaggaagccaaagaggaacgggggagaggaagaggagggggaggccacagaagcaagaaaagcagggaagaagaaacggaaagaaagggggaccagagaaaccgcaggaagacggggccagagagcccgaagggggcagaaagcagccaggaagagccccgccagggccaggcagacaacaaagcaggggagaacacaccagaagcaaggagaccgaaaccaagacaccaacgcacagcaaaggcgcaggaacaggagacccgccaaaacaaaacagcccgcagagacggccggggaagggagacgacaggaggggagaacgccaacccaagcacgagagacgaggagacaccaccaagcagaacggccaaggcacgggagcagagccgggcacaggacgccgggaaggccagagcgaccggcgccggcgagaaccgacccaaccacaccccacggagggaaccgaagaaggagcaaaccggagcacaagagagcaaagcacacagcaacagggggaaaacacgcacaaggaccacacacaaaagacccaaggagcaagaaggccaaaggagagcgaaggaaagggacacaaacacgccaagcaggaagagggaacacgccacaccacagcagggggagacacccaccagaaagaccgaaccggccaggaccaaagacagaccaagcaaacaacagaccaaagacaacccaaagaaaccagagacccaccagaagccaagcaggaacaccaacagagggcaaaacacacacacacacacacacacacacacacaccagagccccacacgaagcacgacacgccgacccgggcccaaaaaaaacagaaccacgaggaagggaagaagagacaacgcaagagacagggcccaagagccggagaaagaaggacaggcccaaaccaggaacccgccccgcccaaggcgggaggggagccccagccgcagagccacgaagcagcaggcgcggcaccgaggaacacggcaggcggggggggcagaaggagaaccaaaagaggagcgcgcagggagcagacaacaccaggacccagcagggcaagaccgagaccgaaaagaacgggggcgagcccaagacagaaaaggaacgacagcgagcccaaaaacagcgccccccccaagagcaaaggaagaccggcgaaaacaaaggcacgacccagaccacaaggcacaccagaggagccgaagaaccagcagcgcccgccccccacccgccccccacccacccagcccggaaccaccgcaaccacacccaagacagccggggggggggggggggggcagcgcacacgccagggcaaggacacacacagcgcaagcgacggagacacaacccaaagaccaaaccaccagaaaaaaaaaaaacaaaacacaaggcccagaccagaaaaaaaaagcaaagccaaaagcagcggaaggcacagggagagaggcgcacacacacccacaaggacacgagggcccacgccccccagaacaagcgccgcaaagcaaacaagggggacggccgaaaggggcaggaagcaacccagccaacacagacccagaaacacagagcgggacccagggaaggggcagccgccagccccacgagagcacagccagggcccagcagccacaaacaccagaaacggcaggccccagagaccccacccccggcccagccgcacacagaaacccgcaagagagaaggcagccaacgaaggggaagaaaagcagcgcggccaagcaaaggcggggacacacgggacgagccccgagcaagcacagagcggaggggaaccagcagccccagaccgaaacagggggccaagacacaacacacaggaccacacaaagaaaagaagcagaggggggaagaaagaaaccaaaaaagccaaaccgcacaagagggccagaggcggcgaagcaggcaaggcgaagaaagggcccaaaaagggggagagccccgacaaaacagagcacacaagaccacaaaaaacgcagcgaggagcccggggaaaagccaaaaggccacagaccaccaggcgcacagaggggagaagagccagacaagcacggcggaaggaaaggggccggaggagggcccagaaagcacgcgccaaacaaaagccagaggaggcaaggggcaccaaggaagggagccacccagcaacggagggcagcccggaggaccaaaggaacaaaacacacacacacacacacacacacacgcacacggccccccaagggaagacggaggagccggaccagcaccaaaaaccaggaggggggggaggcagccaaggaaagggcagcacacgggcaacccggccaaccccagaacacacaaccagaaaggcagcacagccgagcccagcaggggagaagaggggaggacggagcaaggcagacagaaaagcaagggaagcagccagacaccagaaagaaaagcaacacacaaaaagccgggcagaaaagacccccacaaagccagggcccaggaaggcacccaggcaaggaaaagcgggaaggcgggggcaaaggaccagcgaccagcaaccccaggaaaaaaaaagaccaaagcaacagaacacggaggcccagacaacgcacacacagcaggcccagggggccggaccggacgacagaccaggagccccacacgagaccggccggcagggccccagggaagcggggagagcgaagaagaaaggagagaagccacaccgaggaagcggcacagagcgacagagcagagcgaacagagcaacaggacaaacacccgcacccagcgccgaggagaaggccccaaaccacaaacgaaggcaaagaaaaaaaaacgcagaagcagggacaacagagacaggaaaaaaagccaacaggaaagagcaagcagcgaacagagcgaaaggcagcagaagcgccagcccaaagagacaccaacaaacagccccgccccacaggccagcaaaacacaagaggggggaaggagacagagcccaagggaggacgggggaacgggccaaacagacacaggggggcacggaaggcaggaagagggccacacacaaccaagccaacaaccccagcaagaggcagaagggcagaaaaccacacccggcgaggagccgagcagaaggcaagagggagcaagccagccagggaaggaccggcgggccagcccagggaggaacaccgaggccaggcacagacgggcagcaggaaaaaaaaaacacaaaggaaacacaggggaacagggggagagcgaaacaaaagaggggaacagaaaaaccgaaagagaaaccaaagaacaaacaaaagaggcccaggagagcgaccaccggagacagggaaaagaaaagaacacaaagaccccagaagaaaagccaagaaaaacacgagaagcaggaaggggcaggcacaccaacccagccccagaggcagagaggcaggaggaccgggcaaggccagcggcacagaggagccaggacagccagggccacacagagaaaccgccgaaaagaaaggagggagggaccccaagacgcaggagaaaggcaccggggaccaaagaggcaaagccccagccagaagaagaggaagaggggagcagaacgggagccagcaagaggccaacacaaccgccaaccagagcagggagacccaccgagacccaacccagaaacgcgcacagaccacgcggagagcacaccaaggaaaaaagaccaaggaagggacacccaaccggccgaccgagagaggaaagcacgagcgagcaaaccagccacgcgaagccacagcaaggagccccgcccagccccagccgcagccacagaaaagagaaaagcccgcacagccaaacccacgggcgaaacacagaaggaaaaggggacacccccacaaagagaagaaagaccgaccgcccggcgcggcaccgccacaacagcagagggaccacacgggccagagcagggagggcgaagaaaagcagcagacagcaggcagacacagccgaagaaggaaggggcagccgcaacgcagccacgcagggagccggaggacccagaaagaaagaagccaggcacagagaacaagcaccggacaagagaaaggaggaggaagaggaggaggaggaggaggaggaaggcaggacagaggaaacgagggcaacagcaaaaacaggccaagagagagaggacccgaaacccagacgaagaaagggcagcgagagagaggagacagcgaagacccaccaaccggcaaccaggaggaagaagccaagaggggagcagggaggaggggaggggacccgcaagaagcacacgggaggcagaggacaacacagcacggcacccccaccaaggccagggacaaaccaggcaggggccacagggccaccacggaaccgacacaggcaacaccagcggccggaagacacaagggaggcaaaaagcccccaaaaaacgcaagccgcagaaggaaaacaagcgggggccgggcaaaagcagcccagagacagaggaaacaccagagaccaacacagcgggaaccccaaacaaaaggagaaagaagccaagagaggcgggaaaccagaaacagaaaaggaaacaaggccccacgcacccgagcacgcacccgcccgcagacggacccaggcggacacccccaggggcccaagcagaccaccgcagcgaccacaaaaaaacacggagaaggaaaaagaggggccaggggaaggcaaaacagaagcaaccacacaggcggacgcagcaagcccacggaggacagaaggacacaggcacagaagacagggggcaggcaagggaagcgggcggagacaagcaggaaaggggcggcagagcgagagcaggagggggcggagcgagggcaggggaggggggcggcaagggcaggaagggaagcgggcggagacaagcaggaaagggggcggcagagcgagagcaggagggggcggagcgagggggcggcaagggcagggggcacagaacaggcaggaaggggcgggcgagggcagagggagcgggccgagagggcagggggggggcgggcgagggcaggagggagcgagccgagagggcaggggggggggggggggcgggcgagggcaggagggcgggcgagggcaggaggcgggcggagagggcaggagggggcgagggcagggagcgggccgagagggcagcgggggggggggggcggcgcgaagggcaggagggcgggcggagaggagggaaggcgcggaggacaggcacaggagacagagaccggcggggcggaagagcccggggagcacaggcagaacaggacgggaagaggagcggaacgccaacaggcaggcggaggccagcaagcaggagagcagaagcccaaaaaaaaaaacaagaagcgggaggacagggaaaagggaggcggagcaagaacagagaggacagggaggaggaaggaaaaggagcaagaggaagagacagaccaggacaaaagccacaggagcagaaacaaaaggaagaaaaaggaaacgcaacaggaagcacgacaacaggccgaaaagggggcacggagagaaacgaaaaaacgacgaaaaaagccaagaggaacggaaaggggaagacaacagccacagggggagaggcgagaaggaaagcaaccgaggcaggcaaacggagcgggaagacgcgacgggcagcagaggcaggacacgcagggcagagagagcggggaagcaggaggccaaaaacccacaacacaggacacgcccaccccagccgggaacaagcagaaccacaccagacaccaggcgggaacaaccaggcaaacgcagcagccaaaaaaacgaaccacacagcccccaaaaaaaaggggagaggaggggaggaagaggaggggaggaggaggagaagaggaggagaggaggggaggaagaggagagggaggagggggagaggaggagggaggagggggaggaggggagggaaggagggagagggggagagaaggaaaggagaacacaggggagcaggggcaggacggacgacaaccaagagggaagaaaaaagaacaaagccgacaaccgagccgagaacaacacagcgcacccccccccgaggaaacaaagaagcaaggagccggacggaccccggccacagcccggccaccggaccacgcccaaaacagcaaacagccacagcccaacacacagcagcagcaaaccagaagggcccagggccaggaggcaggcacacaagggaccaaaaccacaagccaaccggcgaagaaggaagggaacacagacaggcccccccccccccccccccccacccccccccaccccaaacaacaggcacacagacacacacaacacacagaaagggagcaagagccaaggccagaccaggacaacaaggcagaaggcaggcaacaacacccacacccgaagaggcggcgacaagcaccgcccaccaggccacggccacaggaagcgaccaggccaagccccaggcgaacccacaaacaaccccgcggccccagcaggaccagaccccccgaaggcccaggcgagggaccaccgacccgcccaacccccagagaccagagaggccaccggccggcaacacagcagagagcagcagcgccagccccaggcgaagaaacgccggcagggaacacggcaagcaaacccagcccgggggaccgggaggcaacaacaaacgaagcccggcccaggagacagcgagaagacgcgcgcccacagcagaaacaccgaccaggccggccagccacacaggagcacggcgcacccaaacagcacggcaaacaaaagcacccaagggcagagagcggccaggcaagagcacacggcgccccaggacccagccaacacagcacccacaggggccacaaccacgagcccagccaggggaacaacaccccggaccgaggcagggcacaggacagggcaacacaggcaaaccggcaagaaacaaaaaaaaccaaagaaaaggcacaaaaggagcaagagaacagaaccgcccccaacgagcgaaacagaggccagcccaaaaaagcgaggacaagagacgcccaaggaaaaccacagaaagccagaagacagaaaagacccacaggaaccacaaggaaaaaaaagaaacgcaggcaacagccccccacaggaggacacaaccaaaccaaacagaaaaaacaggggggggggacgaaagaaagacacagaacccgcagcggggaaaaacagagagagcagacccaagacagcggcacaccaagaagaacaggaagccacaaaccacaaccccacccacaagggaagcgaaagaaaggccaggcaacacaccggcagcacaacagcaagggaaacaaccaacagccaccacagggaccagaaaggagaacacacccagcagacgcgaacagagcaaagcagcccgccccaggccaggaccaggagcacagccaacagcacgagaacagaacagaaaaacacacgaggcagggacaaagcacagacgacccaacccaagcagagacaggacagggcaagccaggagccaggccgccaaaaaacaaaaaaaagaagaggagacaaaggcaagaaaaagagacgagaagaagaagaagaagaagaagaagaagggagacagagacagaacaaaaggggaaagagcagcccaccacacacaacaaccgacagaaccagcgccccccccccaacccccacacccaggggacccgacagcagaaggccagcgaccacacccaccgcaagacaagcacaacaaccaagcaacaagaaaacagagaacgcagggaggagagaaaacaccccaaagaccacacccaacccgagaccggacggacacacggcacagaacccacccaagggagacgggaaggggaggaccccaggggccagggacacagagccgagccacacgcgacaagaaaggcagaaggggaggaagaagccacgccaggaggcagagaagggacacaaaagaagagacagagcgcgccagaagaagccaaccaggcggcaggcagcgagggaaaacaccagacccaccaaaaaaccacacaaaaaaaaaaaaaggagaggcccggccgaaacagaaggaaacccaagacaccccgcgccaggggagcgaggcgccggcgaaaagccgagacccgacccaccccgaagaaagcaaagcaacaaggcaagaggaagggcgggagagcagaaggcccagcacgaccccagcgccgggaaccaggggaggaaaggcccacacaggacagaagccacccaaagcagaggcggaaaaaaagggagcccagggaaaacggcccagcggggcccagaagccaggcgcgcgaacccaagcaacacgaacgccgacgcccagcccaaaccagcggggcaggaagagacacgaggcaaggcacgcagcgacgccggacccgggcacaaagaagcgaaaaaacagaaacaccgcgaggggcgaggggaaagaaaaagggggggcccggaggagacaacacggggcacacaggcaaccccagccacaggacgggagggccccgggccaggccagagcaaacggggccaggagccccaggagagagaggagaacagagcccaggcacaaacaggggaaacccagcagcaggaagcacgcagggaagaagaaaagccacgcaagggaaggaagccacagggcaaaggagaggagcaggcagagccacagacacggggggcagggagccccgagggggcggcaccccaaccagggccaccacccaggcaggagccagcgggaaaggaggagaggagacaagggcagccaccacggagacaccagcccaacaccacgaaaacgccacccgggcacgggggcgcaaaacgagggcagggcgaaccgggcggacagccgcacaggggagaccaaagcgggcaaagacagccggggaacggagagaaaagaaaccccaccaaagcagggagggcaccagggcggcagaacaagggggccgagaaacaggcagcaaaaggggcacgaacgaaagcaggggagggacacccaacaacaccaaccagggcgagaagaccagcacaggcccaacccggagaaagggaggggccagacaccgaggcaaaaacagaaccgcccccggccccggggcggggaagcaaggccacgacgcagaaggaccgccaccagagacaggcgaccaccagcggcgagcccagggccacccaagcgcacaccaccaacaggaaccggccacaggcccaccccccaccccagcaagaggaaggagagagcaggcacccacgcgcgacaagacgcgagccggagcaaagggcggggggcgggacgcaggaagaggcccgaccagacccaggacaacagaaagaagaaggcaaaggcccgacagagacgagacaagcccacaaacaagcacaggaccaaggaccaaccgcagccaagaaaacaaacaaccaggaggaccggagggccaacaggcaaggggagaacacacagcaacacagaagacacggcgcagcgccgaggagggagccagccacaagagcaggacgggcaagaaccacgcggaaggagacaaggccgcgggggggcgcgccggcacaccaaggcccaggcaaccaacacacaaaacagacagggaacaggccgaaccgggaggggagcaggaggacaggagcggcacccaacagcaggaggaggccagccgagcacagaggccagccgagcacaagagaccaacacaccaggaggcggaacaaaggggaacaaggaaagaccaaaagggacaagaggacaagagaagggagagaaaaagaaaccaagaaagaacaccaaagaagcagagaccggccgccaaaaggaacacaagaaagccaacaaccaaacggccacggaaagggcaaggcagaaagccaacaccaaacaacagccagaaacgaaacagaacaggcgccgggggagggagaaacagggcaagagagggccagagaggaggagcacccagccgagcgaacagcggcaggcagaccagccaggccaaaaaaaaccccacccagggacagcagaaccacacgaaggcccggagagaagggagagggaaaggcggaggaacggaccaaggccacgacacaccaagagacaaagggacacggccgaggcagagcaggggagccgcccaaggccacccaaacaaggaacacggaaagacaaaggcgggaggaaaggcggaccagaccccggcgcccgaagccccccaagggcgggagggcgcccggaagcgagggggacagggcccgccccggaagaaagccaagaaagaaggcgagaccccagccccagaaacaggcacccaagggggcaaggccagggagcacaggcggacagggcccgccaagcagagagcagggcacaacggagacagggaggaggggggcagcgacaccacggacaacgacccccgcaggcaaaaggagacagccgggagccagccggcgggggaaggggaggagggaagaggaggacaccggaagaggggaagaagaggaaagacaccccacccggccaccacaggggagccccaccccacccgcaccacaagcccggcagcccgcccacaggggagggaacggggcagaagcggggaccagagccaccacgcgcccaggcgcacgggacaagagcaggcaaccagccggagagagagaaccaaccaaggacgcaacaaaaaccacaaccgacaaccggcagagggagcccaaacagcagcacgcaccaagacaaccacacccacgggccagaacgcacacaggaggcggccccacaacccagaccagagcccccaaaccggccaaggacacacaggccgaaccacgcggcacccccgccaagaaacaaggcagccgggaagggccgcgaggcaagggcggggcgagccggcaaagcaggccgacccagcccccgcaaagccgggcacagccggaaacgacccaggaccccaggcccccgcggagccagcccgcccccccccccaccggaacacagccgagcgcaaaggaaaagggccaccacagccaagacccacgacggaacggagccaacgcaggcccccacgccgccaaggaggccgcccagcgccggccccacagcggaagccagcacggaggaagaaacgggaaaggcgggcgccggggccaccccaccagagcagaacacacccggcgcgacaggggccgaagaaagggccccagggacgccagggccacagaccagaagcggccaaccacaaacaaaaacaaaacaaaacaaaacaacaacaacaacaaaaaccacccccaggggaggaaggaagcagaacaggagcacagggcaaaaaaaacagaagggcccccggccccccagacggcacccaggagcgacgcagccacacagccgccccgaaccccccaacaggccccggcgccaagaacaccagcaaaccaagaggaccacaaaacaacagaccacccaggcagggcacagcagaggaggaggacaacaacccacagaggccagcccacccccgaacagaaacccaaaacaagagggaaacacaccaaagggcagaggcagccccagaaccaagaagaggccagaccacgcaggaaggcgagggagcgagccggccccagcccccgccccccccggaaaaccccacccccaagaccaagagcaagacccccacaacagaagaagacaccaccccaagccacagaagccacggggcgccacagaaaccgagcacaccaacaacaaagaacccaggccccaaagcagaggcagaggaggccagggggcagggacacccagcgagcaaccacagggcagcccagagcgccgcgaggcacggagacaaccgaaccccagcgcacacccccaacccagaggaaccccgaagagacagcagcagcacagcacagacaagcagaggcgcaggaagccggggagggaggggggaccggcgggcccagagacacaggagcaaggccaccggcacgggaacaagaagggagaagccacagggggcaaaggaaaaagccccagccacacccagccggcgccagcgaccgcccccagagcccgcccaggcaggaaaggggagggagaacagccaccaggcaggaagccccacccacagaaagggcagcagggccggaaagagccacaccgccggacgcgagggaggacagaagaccccacccacccccaccaccccagcaaacagcagcccccccccaaccacacccggccagaggcccccacaggccccccaccccaccgcacccccagccagggaccccagcaaaagacacccaaagaaaaagaacgagccaaggcaagcagggccccccacaccccgcccgaaaaaccaagcggcacaaaaggccggccaacagaaagaagaaaggaaagcacccaagcccccaccccacccgccaccccaccccccgccccagagaggccgccagcccacccccagagaccccacccaagcagaagacaaccacgagagccggggggcacccgcgggggcccccaacacagagacccccaaaccccagggcagaaagaaaaagaagcacgcaaaaaagcagacgcacaagagacgcagaggcggccaagcgggcacggacggggagcggcacaaacaccagcgacagcaagcaaaaaaaagacccagcaagccaagaaaagcaaccgggggggggagggggacccccaggggcaacgacaagcaagaaccgagggccagacggcaaagcacgggcaggggagccgcaaacggacaagagggagaaagcagaccccggggccggcaacggcagccagccaaccacaagcccaggcccagcaaaaagagaagggagagccacggacagacaccccagagaccgcccccacacaagcacaaacacaacacaaagggagacagagaacacacccacgccacccaagcgacccgcccacagacagaggaggacaggcgggccaacccgaggcgcccagccagcagcccccaggcacccacacaagcccggcccgccaggccccaaggcagacacagaagcagcacagccggacaacgaggccgcgccccggcggccgagccagcggcacacggaacccagaaacgcgcagccacacaagcagaaccacaacacccgcacacgcacccgcaggggccccgaccagcagaggggcacaggccgcaggccgggagcgaaaggcgcccagagcgacgcacgcacggaagccccacccccagagaccgagagaaaaaaccagcaagccaaagccccgcggaccccgcacacaaaagaagcccagggacggagggagagcaaagcacaaacgagagcggcagagacaggccaccggcccccgggacagggcgcaaagagccacagacagacaagggacacagggcagcgcagagcacccacccacacacaggacacaaggagagaggaagaggcacagccacagggggaggcaggaggagggaagagggagggaggggaccaaacccccaccccagaagccccagcccgcgagaacagaggccgaaccaggacaaaaaagcacaggacccaccaggagcagcacacccccaggggcagcaagagcagcaggaagcaacggcccagcggcccgccacccaccccaccaggaaagccacagccccgcaggacaccaggccaccacaccaaccccagccagcgccgcccacagggccggaacagggcccagaaaaccacccccccggcacggggacgcgccacccccacaaaacaccaagcggaaccaacagacacacccccccacacacgggaggagaaggacaccaggcggcaaaagccccaccccaaggaaaacacggaacaaccagccgccgccacgccgggccggagacaaggcacaacagaagagccccagccaagggacccacccacaagaacccgaaagaaggggagacaagacacagacacaccacggggacagggcccacgaagcacagaaacaacaaaggggcgaaacacccccccccgggcaacaagcacgacagacacaccacggggacagggcccacgaagcacagaaacaacaagggggcggaccccccccccccgggcaacaagcacgacaccagaaggggccacccaaaacaaaaacgcgccagacggaagggcgcgagagagggacaaccaggggggagggcaagccagggggaacaagggcaggcaacagaggaccccaacgggcacggcagcagaggaaccccagagaggagcacgaaggaagccagaggaagagcacggagggggccgagggcaaagcgggcccaccccccgcccggcaaccacgggacagccagcccagcccacacaaaggacagaacccagaagaaaggaaaacaaaaggaccagaacaacagcgaacccccaagggcagcaagaagcagccacccggagcacgaggccagccgagacaacaggaaaggaggaccagcgcaaagcaaagccagcagaacggaagccgagaccagacgagaggggcgggagagaggcaggggaaggcgccgcaacagaagagcgcaggacccagcacacaaagagccaggcacgccacaacgaaccagccggggggggggggagacaggggccaggcccgccagccagcaggaagccagggcaggagagacccgccaaaagaaaggggaagagaaaagaggaggcagcaagcgacccgacccacaagaacagcacaccaggcagcagcagagcacacacgcgcgcggcgcgcacacacacacacacacacacacacacacgcacacacgcacacacacacacaacacacaggggggaggaaagaccacgcaagccagcgaaagacacacgggccacagaaaccggcgggggacagacgggaaacaaccgaagcgaaaggccaaccccaaagcaacagaaaccaagagcgagacacagaggagaccaacgcaaggacagcccccgcccagcccgagcccagcacagcggaagcaaccaccggccccaaccacaagaaaacacccaagacaaaccagagagaaagacgcaaaacccccccccacagcccgcccccccaccacacagagccaagagcagggaggccagagcccagaggacaagacgaggaagaggccaaaccagcaggccccccaagccgacgagccaccaggcaaggagcaaagccagaaacagcaaaagccgagcgccggaaggaccagagcagaagaccccccagcccagcacaggacacagaccggacccagacaaacccacagcaaacaaacaccaccagaacgccccaaggccaacagagcggaaacccagcacagaagacagaaagggggcaggcccgacacagacagacagaacacgccaaaccacagcacagggcgcacgcacacaccgggcgcccccccacccacagggaagggccgaaaccacaaaaagcccaagagcagaggcagggccaaccaaagaaaccccaagaaccaacccgcccgaaaggcagagagaacgggaacgcaagcagaagaacaggaagagaaaggaaaacagggagagacagaggaaaggccccccacccccagcaggggccccccgcccacaagacagccagcagccagacgaaacgcagccccggccgcggaccccagggccgccagggccaaagacgcaaacgggccccagaaagacacaggggcaaacccccaaagaaaaaaaaaaaaagccagcacaaagccgacaggagcaacccacgcgaacgcaaagccgccaaaaaaaaagggcgcacccacggccgccgagcaaagacggggccccgacacagagaggaaacgcagcacagagagcacacgggcggccaagacggaccgccgcccaagacggccagccccaaagggagggagcagcacggccccgccagcgacagggcaaacgcgccagggaacagagaacaagagagacacaacgccgccgcagggggcgaggggagacggacccggcgcaggcggcggcgcagccaagccagacaggagagacggaagccaagaggaccgccgaccgccaccagacacaagcaaaaaaagagaaaaacaagaaaaggacgaaaagaaaaaaaaaccacccagcccccaccggccagcccagagggggccaaccccgccgagacccaacaccgcgggccaggaaggacaagggacccaggggggcccccaggagccaccggcacagcaccggaaaacacgccgcacagaaccaggaggcgaaccagcccagagcaggcaagcagggcagagcaaggccagagccagagaagcccacagagccacgcaacaagaaaggaggcaggcaaggggcacaagggccaaagaacaggaccagcaaagaccaggaaagagggaaggcacccccgggcagggcagggcggcacagccaggggaggaccggagccagagccggggcagggccggagcagacggcaagggcggagccgaagcagagcccggggcagggccagaaggcaaagccggggcagcagccagagcagggccaagagcagagccagaggggagggccggagcggcagggccaaaacggcagagccaggggcagggcaggggcagagcaggagcagggccgaagcggcagggccaacaggcaggcccaggggcagggaccaggggcggaggcaggggcaaagccagcaggcagagcccagagcggcagggccagcaggcagggcccgaagcggagggccaggcagacacaacaacagacacacagaccaagagggaccaaggggcagcccgaaacacaagcaaaaaggccaggaagggccgaaggcaccaagcaaaggcccgggaagggcccgagaggagcgggccaggggccgagcagacaaacacacacagcacacacaagacaaagggaacagccggggagacggccgcagggcagccccggacaggcgggccaaaacccccccagcccaccggccacggaggcaggagagggaagggggagccccaacacaaaggcacacagcccaggacaccgccgaagcgagggcacccagaccacccgcagacagcaccccccccccgccccagcgcagacgaaggcgcaccccgcaaacgagccccgccaccaaacacaacacagcaaagagccaaccagagggggccaaaggaagcccccacagacaaaggaagggcaccaccaacaaaacccaccacgcccacaaagaagacgcaccccccgacagcgggcagcccacagagcaggccacgcagggagcgaacagccagccccgcagacacaaccccccaaggcaggcgacaacagccccggggaaacagcaggcgggggaggggggccagagggaccaagagagcgaggagccgccccacagggaaaccagagagccaagacccgagaagggagccagcccaacgcccaccggaacagagcacggccggaacaaaaagcccacacacagaaggcgaccaaggcaccaacgagggggagggaagcccccaagaggcaagggagcgcggacaaagagaggggggcaagggaaagagcaaaggggacagccccaagaacccacccaggggagaggggaccccaacagccccaggaagccagagccacaggaacaccccaccccaaagccagggccaggaagaagacaaagagagaggggggaaaacaggccagaggccaccgcagagagcgacgacaggaaaggagcaggccgagaaccagaggggcgcaccccaagcgcaccagaccacccacaaaacccccgccaccccaagcccacaagcaccccacacccgcgggggcaaggaggggggagaaaaacccgcacaccgcaaccccaggaagcccacacggagagaaagcaaaggggcagggggagagggaaccgacagggcgggggcaccaggaagcacaagcagccgagccccggggcaccccagcccagccccacccccaagacccaagaggccgaccaccaaccaccaccgccccaacacaaaacccccggaggacccccaaaacccccaccagcccccagcaggcccagggaacggaacccacacacagacaggaaggacccgaaccagaaacccacccagaaaacaggaccgcgggcaggagagccaaaaggaccggagaaaggcacaccccagagagcaacaaagcacgcaaagaccaccaaacaaacccaggcacaggccaggggaagaaggcacgggggcacaacaacacaaacagaaaaacacgagcccaaagacagaaaacccaagcacaaaaaaagcaaaaaacaaaccaaaaagacagaaacaacgaaaacaccaggagaccgaaacaaaacagcgaaaaaaacaaaggaggggggagagccagggagagcacagccggcgaccccgaggccaaccaagaacagcacgggaggagaggcaagaagagcaggagccaaggccacggcacagcaaagaggccagccgggcacagagacacacaaagaaaagagacagggaaacagagagaagacaaaacccaacaagcaaaaccaacagcgcgggaaggaccacacacagaaagaaggcgaggcagagggaacaggccgcagccaaagacaagaaaacaaaaggaaaggagagcacccaccagcacccaccgagggaggacaagccaaccacacgggcagggggcgcagggcgagacagcccaagaaaggaggcccggagggaccaaggcaggaagaacagaggacaaggcgggcaggcagagcgagggagagaggaacaagcacgcgaaacacaggaaagacagagcaggggacggggccaaacagaaacccagaaggacagcaaccgacccgaaaggggcccaacccaaccccaggcccaagaaccaaaagagcgggccacggacaaccccggagcggggggggcggaaagccccccccccaccgacggccccacaaaagagacccagcacggacaaagccgagcgcaaggaacagacacaaccaagccaggaaaagcgaagcccagaaaggggggaaaaaaaaaaaaaaaaacacacacacagggagcaacagggggcccagaggaaagacaaagcaccaaggcaaagcacagggcgaaccacccaaaaggggacacccaccaaacccagacccgggagcagaccagaaggcgcgggaggaaggaccgcagaggccgcacaccagagcagcgccgccccaggggggggggggggggggaccccaaccaagcacaggcggcagccagcaggaacaaaagcagccccgaggagccccggcagaagggccaggccaccggcgggcccagcagccgaggccaaaggccacaacccacagaggaaaaacacacaccccaccgggcggcaggacaccccacccgcagacacaccccccgcgcaaagaaaacaaccaggggaagccccggggacagggacaccccaagggcacccacaagaccccagcagcgagcacaccaggggacccagaaagaccacagcaaaaaggacacacaaaaacaccaaaagaaaaaaaaaaaaaaaaaaaaaaaacacacacaacaaacaaaacacacaaccaacacaccaacacacacaaaccaaacccacacaaccaacacacaaaaacacaaaccacaaacacacacacacagcagcacaaacaaccaaccaacacacacacagcacacagcaagcagcgagcagcacacacaaaacacaaccaacacaacacaacacacacacagcacaaacacacacacaggcaaaggagcacacaaacacaccaaacacaacacgacaacacacaccaacacacacacagcacgaaacagacacacacacacagcaaaccaagggagacacacaacaccaacacacaaacacacaccacacacaccacacagcacaacacaacagcagcacggcaaccacacacacgacacacacagacacaacaacacacacacccaacaagaggcacaggcgaacacaacacaccaacacacacacagcacaacacacacacaggcacagaaagcaacacacacacaccaaacacacacaagcacaaccaacacaccaacacacaccaaaaacacacacacaccaacacacacacagacccacacaagcagcaggcacacacacacaaagacacaagcacaacaacaacacaccaacacacacaaagacacacacacacacacacacacacacacacacacacacacaaacgccgcacacccacccaccccgcccagagaccaggcagcccccccgcacgggcgccacaagaggcagaggacccgacggggaacaggaccccagagaaggacaccccagacaggaacgacgggccaaaaaaaaaaaaaaaaaaaagaaagaaagaaagaaaaaaagaaaaggaaacaggacacaacagaacaaaacaaaccgcacaaaaccacagagcagagaagaaaacacacaagacaaccacagaaacagagagcgggagggggaccacccaggaaggaaccgaggagcgagaagccagaacagaagggcaagccggaacgggacacaagcgaacgcagcccggcaagccccacccaagcccaggccgcaaaagaccaagcacaacaacaacaacaacaacaacaacacaccacccgggccaccacccgggcaggccacagcagcgagcccccaaacgcccccaggaccgccaggcaggcggagaaggcggggaccccagacccccaaaggccaccagagcacccaccccccgggcgccacccaaccggagagggaccccgagcacccagagcacggaaccacgggaacacacacacacacacacacacacacacacacacacacacacacacagcaagcacaggcccaaaacaccagaagagagcaaacccaggagacaggggagaacagagggcgggaacgaaccaggccgaagacagaacgcgagcagccaccagcacaacacacacacacacacacacacacacgaaaaaaaaaccggcacggaagcaggaggacgcagggcaccacaccgacacaaagaacaaaccaacaagccccgcaggcaagaaacaacaaaaagaagacgagaaacaaaccgcaacccagcagcgaccacacacacggagcccagaaccccacagggcccacccgggacggccagaaccaggcacacacggcgccgagcccaacccccaaaaaggccgccccgccgcgggaggaagggagcagggggggaaaaaaaggcccccacgggccgaggaggccgaagaacacaggcagcccagcggaaccagagaacagaacccccgggcgcacacccagagaccccaggcccacgccagcccagacaacaccgaccagcaaagaggccacccagcgcggccccgcgacagcaccaaagaaaaggaaaacccggccacaacaacaacaacaacaacaacaacagaacacaacaacaacagcacaacacaaggcacaacacacaaagcaacacacaacaaacaacagacacacaagaaaacaaacaacaacagcaaacaacagcacacaacacaagagcaacacaaaacgcacacaacacaagagacacacacaaaaggcccaccaaacaaacacgagagagaaaacaggggacgagaaaccccagaggagcccccagaaagagggcccgggcacagccagaggaggaaccggcgggcacaaaaaccaagcccgggacagagcaggacgcgccagagcccccgcacggaaggaacgggaggaagacaagaaccgccaggaaacaagaacaccaaagggacgggaagaaggccaggggaaccgccacacaaagggggcacacaccgaccaacgccacaacacacgaaaaccacaggggagacaggcggaacccagcaggagaggcagggaccggccagcagaggacaacgggagccaggccaagagaaaggccccaaaacaagaggagacaccaggagacacgagaggcacccaggcgacccaaccccaagcacgggcacaagacccacagagcaacacacaggcaacacagccagagcgagcaacaaagacaggagaaccaagaagcacaaagagcaaaagagagggaacccaaaacacacaagaaaggcaggcaggcaccagaaacagcggagccagagaaagaaagaaaagggagccaggaggaagcagggcccacagagagagcaagagagacccaccagccgcaggagcacaagagggagcagaaagaaagaggcagagccgggagagagagcccaggccaggccaccccaggagaagggggaagagcaacacagacacacgggcggaagaccagccccgcgggacagcaacccaaccaagcagagggcaaccgcccaggcagcagaaacccaaccccaagaggagaaagagaacaagaggaggaagcccagccacacagggagcgaaaggagggggcagccagacggaagccaggagcaaccaggggaccgagggccccgggcacaaagacaggcagacccagggaggccccacacagagcagcacgcccccccacagcccaaaccagaacacacagcaagcgcaccgacaacccacgcaagcagcccaccggaccagaaacaacaaacaaaccacaggccagaacacacaaaaggaaaaaaacaaagcccaaggagaaaaaggcaagccagaaaaaccggggcaagaagcagccacaagacaaaggaaaacgacgggcccaacaggaagggaaaaccaaggacacaagacaaggaagaacagcccaaaacacaccaaccagagaagagaaggagcacacgcacaggggaggaagaggcaaccaaaaccccccaggggagacaaccagaacaccggagcggaagagggcccaggaaccacaggccacacagaagaaacaggaaaaagggaaaggagggacagagagacagagaaggaaggcaggaccacccaccaccagaacaggagcaaccaacagaaccacagacacaaagggcaaacccaagcaacgggggaggcgcagcagaggaacagggcagaaaacacccgagacaagaaagcgcacaaccgcaagagaggcgagaaagggcaagaccaccccgaaggcaggaagagggcagaaccccgaagcggacagggcaggggaaaccaaccgaccgggaccaagccccaaccacgggccaccccagacggggaacacaacaaagaaaccgcaaaaaaagcacaaaaaccaagacgacagaccaaaagcccaccaaacgagaaaccgcaaaaaaaaagagcacacaaacaccaaagacagcaccaagaacccaccaccgaaaaccaccccaaacagaacagcaacacgaggcagaaaaaagcaagcccgcgaacagagcccacacgagcaggccccaggggacacgcggaaacagacgcaaggcaaagcggcacacacagagcacacccaaacacaccgagaggccagcaaaaaagaaaaacaaagcaaaaagcaaacaagacggggggaaaagggaaggcgaggaacccaaaccacagcgaggccgacgcccccaacaaagcaaagccgagcccagaagcccaggccacaccccccggcggccgcgcccagagacacacgaaagaccaccagcaaacccaggaacggaacaaagcacggcccaaaacgccaacaggagaggggcgccaaaggccgagagcaaggccccaggaaaagggccccccaggagcccaagagcgccaggggccagccaggcagacccaccaccccaaacagcccaacaaaaccacagaagagcgccaagagggcccggggggcgacccaaagccaagagcacaggagaaacaagccagcaggggggagaagccccacgccccagcaaacaaaaccaccccagaagacgagccacaggggcggaaacaaaaaccacaggagcagcaggccagaaacccccaacggaggcaacaaaaaagagaaaaaaaaacaaaaacgaccacaccacacgaggaaaggagcagcaaaggggaccgagcaaaccccagaaaaaaacaagcagaaaagcggccggccgcgaggacagggccagaaggaaggcaccaggagcaggcaggcgagagagagagccggcgcccggaagccagcaaggcgggggacgaggcccagcagccaacgagaaagcagaaggacacagacccaaaacccagcagacaaaaaagacgaggcaccgggcgcccaaggagagcgggcggcccacggaaaggcccaccagcaccagccaagcggcaaaaagcaacgaccagacagaaagccgaacgggggacaaagcaaacacccccccaaagggccaacgcggcccaaggggagcgaacgagagggagccaagaaaaagcagaaggccggaccccagccgagcgcggcgccgcgcccagagaacgacaacaccgcccgaacgacaacacacccccgaaccgcgccaacgcagacagggcccagaccggagccaagaacaagagcacacagggcagcaagggaaagacaggcgaaagacagcaccagcagacaaacggaccccaagccccggaacagcagaaacagaccgggcgaacaccagcgagaaagcaaaaaaaggacccaacaccaagcgacccaaaagcccccaacccccccccacccccgacccacccaccccacgggcccgggccccgacgggacaaaaaggcaagccaagggccccccaggaggccgacaggccagaacaagcagcagagcaagagcggggacggagcacaaaggccaccaaggggcagaccagcccgggacccagcccccaggagcccggaccaccaaagcgacggagcaccaccgggcaggccccggcaaaccacaagagacagcagcgggcccagcaaaacgcaggagcaagggcagcaggaagcgaagggaggacccggaaggcagccagaaaccaccgcaagcccaaacgccgaacccccagggggcccaacaagaaggggcaaaggccacacggccgccgagcaggagcaaagacaacgggaccaagcgggcaaaccacacaggagacaagggagccggagggacccaccaggagagcccccaggccaccagccaggaacaaaacacaaagcgagagaccaggaaagaccacacgaccacccggaggggcacgggcccagccggcaaaaaaggcgcagaacaagggagcaggccaccgggggacaccggaaagcccaggagaggagcgggaccccggagacagccaacgaggaaccgccaaacgaccagaggggacaagcgcaacccaccaacaaggaggaggccccccacaccgccagcacgcgcacagaagacagccacgacggggaggggaaccaggggagagcacccgagaaaggaggaacacagggcccgccacggacccagggagaacgcagccgagccccaaaggggagacggagccacccgagcaaagggaaagccccacgaaggaaggaaagacccccaacgggggcgcagagagcgccgcagaagcgcaaccagaggcccaacgaccgacacagcacaagccagcgccacaggaacccccgacaacgaggccccacaccccaaagcaggccggagggagccaaccacagagaccagacaaggagaaggaaggacacacaccacagaaaccgccagggccagcaccaggaaaagcacgccacggaggagccccgcaaaaacaaggaccaagggggggcaccgggccagcgccaggcacgcgcacaaccagaccagcagacacaagccaaaacagcaggcaggcagagaccaccagaggccaccgagaagaggcaccagggaccagagaacgccaagccccaacggaagaagagggaagaggggagcagaacgagagcggcaagaagccaacaagaccgccaaccagagcagggagacccaccgagaccaacccagagacgaagcacaacagaccacccagagagcacgccaaggaaaaagacagagaagggggacccaacccagccgaccggacagaaaggccagacggagaaaaccagcaccagaagcgacaggaggagccggggaaagggcacaaaacacaacacgcaaaaggaagaccccccaagaccccgacccggcaagccgacaggaccaagacagcaggaagggagggagaagggacagccgcagcccgaaggggagcccgcccaccaacgagggcacgggcgagagcacaaaggagggccgaaccgacccaagacacagaaggagggagcaaagccccacacaacaagagacaggcgaggagacggaaccgaggaccgaagaaccacccgaacccgggagaaaccacggcaggaggagacggaggcggacagaggagaacagaggagcacaaaccaaagggaaaggcgaagccacggggcgggaggacagagaagggccaagaagaggggagagacccgcagggaaagggaagaacgggaagaccgaaggccgaagaaccgcacaaacccacggccgggcgggggagacaaagacgccacaggggaaaggacgagacaaaccgacgaaacggaccggacgcagaaacgccacaccaggcccaggcagaagccgagaaggacgagggggaccaggacggagcccccacgagaaaggagccccggccccaggagcgggcaagggacacaccaaagaaccacccccggggacgaaagccgccacgggacacccgaggaaccgcccaccccggggaagcacgcagagcagggggcaagcgaagggccccagcagaggcaccagagcagagcccagaaagccaggcccaaaggggaggggccgcaaaacccacaaagccaaccaccccgaccaaggacagagaagagggcagccaggaagggccaaagggaagacagccagccagggaacgaaggagcagggacaacaaaaaaggaggcgggaccagagggcaaggagaaggaccaagggcgagaagaaggaacccgaggaaaaagcgagaacgagaccagcaaacagagcacggcccgagcgccacgacgccagggaaaggggggaagcccacaagggagggcaagggccagcacaaagcaagaagggcgcccgaggagcaagaacagaagacccggaggaaccgagagagaaggccccccgcgagacgggggaagcgaaagaaagaaggcacccaacgccagaccagcggaaaagccagcccacgaggaggccgagagagccgaagcagcaaaaagcggcgggagccagcgagcagcaggggaggagcacaaaagagaaaaggaaaagaaggcccaaggcaaagggcacgcgggcgccaggggagggaacccgccaagacgggccaccgaggcgaaccgaagggcggacgggaaagaaagggaagggcgggaaacggcccacaggaagagagggcgggaagagccgggggcaggccaggcgaaacacgccaggcccgcccgagccgggaaaaacgggaacgaaggcgccaagacgaccccccacgcaaacacaaggcaggcgaaaggcaggaggaacggccagcaggagcgaggccgagcagggcacccagggagaagccaaaggaagaagccggccgaggaaaacaccacacccaaccgaggggcccaggccggaccggagggggggcgcaccacgaggggcgagccaaggagccgcaccgagaccacccaccgacggcgagccgcacaggccagacccagggcacccagcgcccacgggcaggcaccccaggcggaggacaaccacaccgggggccgcaacaagggagggccccaaggccaccgagcaggcccgacaaggagaaaagcccgagcccaccacacagagaagcaaaccaggcagccagcgggggggccagacggggaaagggaggcgggcgacgagggagggcggcgagaagacacgaccccgccacggaaccggagaggaaggccgagagagcccgggacgaccccacagcagaccgggagacagccccccgagcagggcagagcaccgcaggcaagcccccacagggagggacacagaacggcgcggacccccccggccgaagagaaggcccaaaacaggacccccagaggcgggcggccgcacagaagcgagccgagccacacccaccggcagacaccagggagcccagaaccaagaggccccaccaagcgagggaaagccccccgggccgggcagacaccgcccggcggaaaggggccgaaacggagcccaaaaagggcgcgcccagaagccgggcccgccgcccagaagcgagccgaggcacacccaccggcagacaccggcggagcccagaaccaagaggcccgagcgagggaaagcgccccgggaaaaagacgcaccagaccccaggagacgccaagcacaccaagacaagccacaaacacccgaagaaggcggagaagagcaagaaaacaaccaggaacaagcaggagagggaaccaacgacgagagggaaccgagggaggccagcgccccgaggcacggagcagaagagacggagcagccccacgaagccagggaaaccagcaggaagggagacacagcgggaaggagggcggccggagagcacgaggacacaacaccaagaaacacgaaagcagcaaccggggcaaggccagcacacgaagcaccacccacagaccgcggagacgaaagagcaacgcgacaagccggcaggaaaaaaaggcccccaaaaaaggcacagaagccagaaaggaagcaagccaagcaggcaaaacagaagaagggggaggggggggggagggggaggacacgcaggggaagagagaaagacacacgggggcaggagagcagggaaaggggggggggggggggggccggaggcacagggcccggggaaaggaccagggacgagacagccccagaagccaaacccggccgagcaaagccccaagccgggccccagacgaaagacacccccaagaccccaccccagcgaacgagccccaaggggcccccaccaagggcagagcgggaggcagagcacacgacccagaacagacagagagaacgaaaaccaggaggaagcaaggcaaccccaccagggaccacaagaacaaagcaacaggcaacaggcagcagagcacaaaacccaagaacggccagcgaaaacaagcaacaccccaaggcccagcggggacgggaaaggaggcaaacaccccagcccggaaccccggacaggggaagggaaaggagccagcaagggaagagaggagaaccaaacaccaggggaaagaggcggcggccgcccagcagcagagaagccgggaagggaaaaagagagagacggaacgaggcgagcggggaacccagcccagagacacaccaccggggggaaggagaggggcagcgcagggagcaaccgcagagggagcaacagcaaggaacaagcaggcaaaagcaacaaacagcaccccacacccccccacaccccacccccaaaaacgaaccgacagcagggacgaaggccccccaagccaagccaaccaccccaccaagccacccaagcccagaaaccccccgccacaggcggggcgaacccagaagacaccgcggacgaaaagaagcgcagaccagccacaagcggacgaggagccgagaacgcgaggacaggacacccggggaccagccaagagccaccgggaggacacgaaggccagaagcagcaggccacacccccgacccggaaacacccccaagaacagccgcacccagaagagacgcaagcaagggaaaagccaaaaccacagaggcccaaagagagacaagccaaagcagcggcagaggggaaagcaagcaccaaggcaggacagccgacacccaggagcaacaagaccccgcccaaagcggacagaaaacggcggggagaggcacagccaaccccccaccgccaaagaagaaaagaaaccaggccaaagaccccccggcagaggcagaaaacggacaagaaaacggacccacaaggagcagcacccaccaggaaaaaacaccaagcagcccccaaacaacaaaaaaaaccaacaaaaaaggggacaaaaagaacaaaaaaagcggggggggagagcaaaacggccacgggacaaacaaaaagaacaaagacaggagcagagaaggcgaccaagccccacacaccaaaggaaccccaagagcaagcaagaggacagcgcgcgccaagggagaagaggcacaaaggaacagaccgcagacaaagcgcgcgaggaggcaccagcccaggggaacaggacacaaagaaggggggaaagagccaccagaagcaccacaacgcaagaacaaggcgcgaaaggggcacagacaaggaagggaagagaggggagagaaaagcccacgaaaaaagagaaagaaggcccccaaaagaacagaaaaaaacaagcaaaacacagccaccggccaaagccacccccaaaaagcagcggcgaaaaaacgaaaagaagcgcgaaaaccaagaaggaaaaaaacaaaaaaaaccacaaagagaggcgagaaggagaagcagacaaggccaagggcacacagcaacacacgcacaacaaacaagcagaaacgaaggagacaaaggaccacgcaaaccaaaagagagaccacggagacacccaacagacaacccaaagaacaacaaaggaagggaaaaaacaaaagagaaaaggaaaaggagacccaaacgagaggagaaaggggggggaaagaaccgccaggggagcacccgggggccacgaccgagggcagagggaaagaggaaagggcaggaaacgccgcaggaagagaggcgggaagagccgagcggcaggccagggcggagacacgcccaggacaagcaagccgggagaagcaggaaacgacaggcgccgagacgaccacacgcaaaaccgaggaggggaaaggaggaggaaccaaccaacaggagcaaggccagcaaggcagccaggagggaagcccaaaggaagaacggcccaaagggaaccaccccaaccaaccagggcccaggccggacccgaaggagaggagcgcgcaccacgggcaagcaggaccgcaccgagaccccaccgaagggagcgcacagaccgacccaggcaacccaggggccccggaagcagccaagaccggaaggcaccacccggaggccgaagaagggagccaagggccaggaccgcccgaacaagggagaagcccaaagcccacacacagagaaggaacacgaacgccggggagggaccaggacgcagggggagaaggggagagccaggaaccgacggcagcaagcgcccaccacggaccaagcaccgccccaacgacggagccaccccggacggggcagaaccccagagcaagcgccggaccggacgggaccgcaaccgagacgggggcgagcccgggagaggagcgcccgggaccgagaccggggaccaagcccgagaccgggaccgggcagaaagaccgggagggagccccggagggggacggcggaagaggcccaaggcgccagggaccaaccagacagacagaaggaacggccaccggcggggagccgggccgggccacggcccagaccccaggggaacagagcggcccccacccgacccgaagcaccaaggacacacacaacggacccagaccaggcgccacaacccacagagacaccaaccccaggcacagcagagacaacagaacagaaaacaaacaaaaaaaagccaaaaagagccacaaaaccgggaaaaggagaggaaaagagccagcaggcagcagggcaagccaaaccaaaaacacggggcgaagaaagggggcgacccccacagagccaacaaaagacagaagcacagcccccgaacacaacaaaaagcagaggacggcagcaagagccaaggaccccacaaaacaacccccccggccggagaaggccagaaccaaggaccggccagaggcagcaggagacaccaaagcacaagccgaaggagagacgcccagcccggggcacaagaaaaccagaggaaagggaagccagcgcaggagaccaggggagagacccgaggaaccgcacaggagcgggaaaagccacgggaggcagcacgaaggcgggcaggacacagggcaccccaggcgggcccagcgaggaagcaagggaccaaggcaaagaaagagcgcgaggaacgggagaaggagccaaggcaccagggggaagcaggagcagcaggcagcagagcacagagcaacgcaagagcacaggaccacaaccagaggcagacagagagagcgagaaggcacgaagccaaaacacacccaaggacacaccccaacaagaccaccccaaccccaaaggccacaaacggagaccaacaaacaaggccaagggagccacaaaacaaacaccacaccaagacagaaccagacgccccacagacacccaagcccccgcaggaggggcaagacccgggacgggacggcaccagaggccggagggaccccacaaacacgaacccagaggccgcgcccaggaaaagagcagggccagccagagacgcgagcccaggagaagagggcagcagcacccgaagcccaccggggcacaaagccacacgacagaccacagaccgaaggagagcggccaccccaccaagccaccacacccagaagagcaagccacagaagccgccgagaaaaaggcaacccccaggccagcccacccaggagaacccggaagcccacagcgagccacaagacggacagcggcgccacacccaaagccccacaagagaacgacaaaaacacaggcgccaagaaaaaaacgcccccccccaggggaaaccagacaaccagccaagaaacccgccccaggagaaaaaggaggacaggagggaccacaaagcaccaagacaagacacccagcagacagaacggccagaaggacgaccacacgcaggaacagaaaccggcagcccacaggcccagaaaaagggccaaagagaaaccagggccaggggcaagagagcgcacacagaaaccccggagaaagaaccaaaggccaacggcaaggcacacacacacacacacacacacacacacacacacacacacacacggcacacgaaagccgaggacgcaggaggaagggaaaaggcaaagacaagaagcggggggacgaaacccccggcaccccagggcccaccacgccggcacccaaaggagccaaaaggagaacaacacagaaaacaaaccaaacaaaccacacagccaacaaaagacgacaaggagagaggccccgagggcgagccggagggccagagaacacgcacacagaggccggaagcgccccaggagacccggcagccagaagcccagcgagacagaaccaaacaccccacggccagagcccagagagaggggacgcggccccaaagccacggacacgacgcaacccaagagggacggaacccgagacacagaacaggcaaaaccccagcgggccaaccaggagccacagaaaggaaacagacacagcaaagagaaacaacacagggcacacaccacacaggcaaaggagacacagcaggagcacacggcacaggcaaaggagacacagcgcaggagcacacggcacaggcaaaggggacacagcacaggagcacaccccagggcaaaggagagacagcacaggagccacacacacaggacaaaggagagacagcacaggagccacacacacaggacaaaggagagacagcacaggacgcacacagggaaaagccacgcccgaccacaacaaagcagcgccggccaaaacaaccaacagaagcaacgaaggcaccagccacagccaaggacagagagagagaggaagccaggcaggggcaaacagcgccaaagcaaagagcagccccaacacagacaggaccccagcccagggaagaccgcccacacaagaaaaccaaagaaaccccaaggcaggccagaggccgcccccagcaacagacgccggacagaacacacccaagacaaagaaacacacccagggagggaggaggggagcagcacagcacgccggacagaggggagggaaccacacgggaggaccagcaccccgaggccagaggggaaaccccggggagaacccccgcaaccgaccgcccaccccccccccccaggccgcaggggcgcaccaaggcacacagcacccgacccagccgaagaaccaccaacaaaccgcccccccccccgagcgcccaacacccccccaaggccagaaaaccacccacgaagcgcgcaaccagcccccacgagccagggccaggacaggaacagaaggagaaaagaggacaaccgaggagggaccagcacaaaggaacaaaaggaagacacgaaagggacagcccaaaagcggaaacccaagacaacacagaccaagaagccagcaagaaggaaggcaaaagggggcaggcagaagggaaacaaaaaccacaggaggaaaaggagacaaaggggagcagagacgaaggaaaggccacccagagacgccccaccgggggccacccagcacagccaccaaacccgaaagaaggagccaggaagggcgaggaagccgaaggcagcccgagaggccgccagaacaacaaaaagaggcagaagccgaaaccaaccaggacaagccggaggcccgaggagaagggacgaaggagcgaggggggcagccccaggaaggagcaacaggcaacaggccagaccccccccccaagagccccagggacggaccaccaaccaaagagacacaggagggacccaggccggccacaagggcagaggaggccgggacacaggggaggagagccccgggccgaggggcgagccccaggaggagaagccagagcaggaggcgggagggggggggggagcaccccaagaggcaggggaggggggagggaaggggccgaagggaagaccggaaagaggaaaacagaaagaaaaaagaaaaaccaaggaaggaaggaaggaaggaaggaaggaaggaaggaaggaagggagagagagagagagagagagagagagagagagagagagagagagagagagagaaagaagcagaggggggcaaggaaaccacacgaagacgagcggaagacaaagcaaggccagcgggcacaaagaagaggaagaaaggacggggggcaggagggcgggggggaggacggaggaggaggaagggagggggagaagggaaaagaaaaaagagaaaagagcacaaggccaggaaagagggagcaaacccggacaacacacgacgagggaaggaaaaccacgaacgcaaagggaaacagcaaccacgagcagaggaggacagcaaggcagacccggccgcccagggagaacacccggccagagccgcgcgggacgcaccccaccagcagcagcaacaaaacgggcaggagggcggcaccaggagaacgcaccgggcccacagcagaagcgagcgaccgaaaccaaccccgcccagggcggccacagggcccacccgcacccgcaaccagccagaacacgccacacaggcccgagcagccaagggcgagacgcggaacagacccaaaagcccccgcagccggggcacagcaacaggaagcgaccagcacaccaggagaggcccgaagggcggagcagaccccccgccagagccgccaccacggagcagagaaagagaagaaaaccgacaagcccgacagacggggcaggccagggcaaccgaggaccaagcaggcgcgcaaaggagcgcccccaggcagaagaacacccacccagaggaacacaacacaccaacaacgggggcagggagcggcccacacccgcgaaagccgaacccaaggaaagacacacacacacacacacaccacagccaaaaagcaaacagccaaaggcgggccacccaagcccaaaggcgaccagcccccccaaacccaagaacacaaaaacaaccacggcgcccagaccaggcagcaccccgggccagaccccagacaccgagcggcccccccccccccccccccccccccccccccccccccccccccccccccggcccgcgggaaccaaaagccacccgcccgcccagccaagcccggcaacaaccaacaagaccaacggggggacagggcagggccccagcacagggagagaccagcaaggggaccagaaacaaaacaaggcaaaaccaaaccacaacacacccaccccagggggcaaaccgggcagacgcaagaagaggcaccacaacagacaacaaaaaaaggcaggagagaacagacaaggcagagaaaggccagggaaagagcacggcacccagagaacccagggaaccagcacccacaggcagcccacaaccacaagcccagccagaggacgaccaacaacacaggacacagacaacacggaaaacaaacacaaaaaagcaaaaaagggcagaaaaggccagggaagaacgcaacgccacagaggaccagacagaccagacccacaggggcgcagagaaccagaccagcccagcacccacaggggcgcagacaaccagaccagcccagcacccacaggggcgcagaggaccaagcagcccagcacccacaggggcgcagagaaccaacacagacccagcacccacaggcagccacagcggacccagccaggggcccaaagcccgcaacaggggacagcaagacagcaaaacaccaaacaaaacagaaaaaacaaaaagaagaacaaacgaacaaaaaaaaagcaaggcggcgcgcaaaaacgccccccaacaccgcgacggggccacaaccaacaaggagcccaaacaagacccccacaaagggagaaaggccgcagccagcagggggcagccaggcgcgggccgagacaacaacaggaaaagacccgaacacacgccccgacacacgccaacaggggccaccaagaggcgccaacgaagcggagaggcacaccagggaaccagggcaacagaggagaccagagcccgacaggcgaacaggggacacaggacacaccccagaacagcacagccacaacgaggcgccgcggaacccagcacaacaccgcgggaggggagcgaaaacagaacggaaacgggaaaaggcaaaacgggagagagaggagaggggagaaaaggagaagagaggagggacagaagaggagagggaaggagaggaagaggaagggaaggggaggggaaaggaaaaaagaacagcagagcacgagcagaaggccacacagagccccccacaccccaccaccccagccccgagcccaagggcccagagcgagaagcacacagagacaacgaagcacacacgacaggaagcgggcgggcgcgagcggggaaaaacaacaggggggcagaggagcaagggagggcccggggcccggacaccgcgggcgggcccaggagcgcagggcacaccccagcggacaaaacagacccccgccagaggagccagggcaggcagccccgggcaaggagggcaagcgcaagcaagcaggcaaaaccaggccaagacaacgcaaagcgcagccgccgcaaagcggaaagcagccacgcccagagggagaagagggcaaccagggcggagacagaggggagcaccacagaggcgggaccaaaccggccgggaagagcagccaagccaacagcgagcggcccagcccccaagaaaccagcgggaaaaaggaccgccaagcaggcaaccccgaccgaagacaagggacacaaaacacaacaaaagagcagcccaaaccgcaagggaagcaggggcaggcgacccaggcagcacggaaagaaagacggaaggagggagacagggagaaaagagagaagaggggagaagggggaaggggaggaagaagagagggagggaagaggaaagaaggaaggagggagggagggacagaggagggaggaaagaagggagggagggaaggaggaagcaaagaggagggaaggaaggagggagggagggaaggaaggagggaggaagggaaggaagagggagggagagagggacagagggagggaaaggggaaagaaaaagagaggaagcaaagaagagggaacgaagaagggagagggagggagggagggagggagggagggagggagggagggagggaggaggaagggggcacggaggacagaccccccccccacacccaggagaggcccaggccaaccaagggccgcacacgacgaggcacaagagaccaacgaccaccgcccagccacacaccaggaaggggcaagggcgcgccgagaggaaaagaaacaggagagagcccaacagacgcgaagagggagaccacggacaaacaagaccagaggaacgagaccaccagccccccccccaaccccaaccagagcgaggccaccaggacgccccaccccacacagcgaggccaccaggacccccacccccacacagcgaggccaccagacccccacccccaaacagcaaggccaccagacccaccccagacagaggggggacaacaggacaggagccagcaagaagaagcaaacaagccaagccacaggaacaccgaacagaacacaacaccccacggaccgacacacgagagaaccaaggggaagccacagggcgccagggcgcgggagcccaaggaccacaggagccaggccaccaccgcacgccaagcccgggccagcccgcccaagaccaggcagagacagaagcgcagagccgacgagaccaccgaccaaagaccaaagaacacccccaagcagccccccccaccagaggcaaccgaaacaccgcagagagcccggcgcaacaaaggaacagaacaggagaagggaaagcacacaagcacagagaacgaacaaccaggcagcagcgcacccacacggagccgcaggcccgacaccaacccacccacagaaccggccgcagagggcgagcccgacagaacaggaagccagaacggcacaagcaagccagacaccagaaagcgaggcaacccaaagccccggggacaaacacaggagaaaccggagcacccgaaaagcgcaagaaaggcaaagagacagaaaaaaaacgagccaggcaggcggagcacaccgacccagcaccaggaaacagaggcaggggaccgagcaaggccagccgacacagagcagcccagaacagccaaggcacacagagaaacccgccaaaaaaaaaaaaagaggaggaggacggaagaagaggaggaaggagaggaggagggagaggaggaggaagaggaggaggaggaaggagaggaggaggggagaacggaagaaagccaaggagcaagaacacaaggaagaagaaaaagggaaaaagaagagggcgaaacaaggaccaagggcaggccggaagggcagaaggagccagacccaaacggagcagggagccaccagggggcgaaaaccgaacggggccgaagagaacaaagacaacccccggccaccccagacccgggaaaagcaaacagcgccacagagaacagcagagcaccgaaggacgagggaaaaacgagcaaaaaagcaacgaagaagaccggggacaccgaagcccgaggagaggaccaagcccagggacccaagaaaacaccaccgggaggcaacaccaagggagcgagcccaacacgaacagaaccgcccaaacccagccaacggacaagcaacagaaaaaccaaaggcaccaagcagcagagacaacgggcgacgcagcaacaaaccacaccacccccacgacaaaaccacagagccaggcaggcccccaaaggaacaaggcagggggacccaacaaaacaaacggaaaaaaaaagaggaaacccaggaaaacacggcggcaaaaacccgggagaagcacaagagaaaaggcggagcgcaccagcggcaacaacgaacagagaaaaagaccaggaaacgcggaagggagaaagacggagggaggcagcaggcaggcagggagaccgagcaggccgggggcagagcaagccacacagcgacagcaggccaaagaaaagcaaaaaaaagacagggaaccgcaggaagagagggacccggagcagcaggagcagacagggggcgccaggggacgagaaggagccgggccggaagagcagccagcaagccgagccaccccagccgaacaggcccccccccccaacaaccaaaaccagggcaggaaaagcacaagaaaagaaaaaaaaggggggagggaaaacaagagaagagacaaaccaggaagccagcacagcacagcaggggccaagggaacacccccgcgggaccccaaccgaaagcaaccaacagacaaccagggccacaccacaagaggaaagagggggcagcagaaagacaccagcaaacagaagaccgcagcacagcacccacgagccaggccaaagcacacacaaacccggcgaaaagggggcagcaagagacaggagcaccggaccacggccagccagcaggccaacaggagcacaggccaagagacggccaaaagacagaaggcaccgaggacgggccccaggggacacaccacacaaaaacgggacacaacacaagcacacacaggcagcacacaccacaagacacacacacgcacacaccacaagacacacagcacaacacagcacacacacagcacacacacagcacacacgcacaaggaacaaacgcagccaccccggcccccacacaaaaccgccccaaccgagaaagaggcccaacaggaggcccaaccacaaggaaagagcaccccaccagagggcgcaagagaaggccaaaacgcaacaaggccccaggcccgagaaggaacagaggcggccaagacaagagcaccgcaggaagccgccgagaggcggcaccccggccggaaaagaacacggaggcaccaccaagaagagggcgaccggggcacgggaccgggcggggcccgcagccaccagaccccagggaccccaaacgaaaccccaaagagcagaaaagaggggcaggaggcacaccacccagaaagccagaagggcggaaacgaagcgccacacgccgcccccgaagcaccaacccaggaagcggcaggccccacaagagcccgggccggcccgccgaggagaggaccggaaaacaacggggaacggaccgcaggagagccacccagcacccaacacacgcacaagcggcccggacaccccccccccccagggcccaaagcacgacaccacaaaccaccccggggcgggagaccggaacggaaaagagaccccaagagggcgccaagaaaggcgcccgccgacccccaacccaccaggacggcgccaccaaggcgggaccacacacgccgcacagccgcccgagcgaggagaaacacaacaggccaacacccgccccccccccgccgccgcccccagaccccccaccccccccacacacacccacagcagggaaggaacaaacacacagaaaacaacaaccaacaacccacccccccaggggggggaaaacagcagcgggggggggggggggggaacacggacaggacaggaagggagaagggaagaaaggagcggggccgggcggagggagaggcgggagggaagaaggggagagggcaggggcaggagggcggcgggcgggaaggggagagggcagggggagggcggagggcggcgagggaggaaggggagagggcaggggggcgggggcggcgggaggggggaagggggagggcagggaggggcgggaggcggagggagagagggggggcagagacagggcggagggagggcggggggcccaggggcgcggggaaaggcagggcacaggcaaggagaaggaagccagccccaccaacacaggcacacccaggagcagcaagagaaaaggacaacagcaacccaggcaaggacaaagaggcaccagcagggaaaaggcaaacggaaacaagcagaaagggggccagccccgcaggagacagaaccgccaggagcccagaacacagcacaggacagaggacacgggcagaaaggcagccacaacgcggggagcaaagcagacagcgggaggcccagggagaaagagaggagaggggggggacaaaggcacagcgaaccacaaccggggaacagcccgcgagcccgaggcaaaacaaacagagagcgggaaagaagaagagacggccaagcaaaacccagaagggccgacaagaagggaccgaacaaccaagaaaagagaccccacagaggggccaggccgagcccagagagggacccagacaagaaaagggcaagaggcaggaggaaaaacccaggccgggggagaaccgaagaggagaccagacgcccccagcccccgaggccagccgaacagaccacagagcgggagacaaccccccaccaagccacaaaacgcggaacacgacaacagcccaggccaccacagacgaacggaccacccgacgggcccaccaccccaaagccagcccagcgaccccaaacccgcaggcgcaggaccccagagaggagcgaagagcgacaaaccagggccaggaacaagcaccacggccaccagccaccgagccaagaggaaagcccgcacgcgaaagaacgaaccaaaacgaccccaccccccccccaacgggcaaccgaacagggcacgaggacaagaagggagagggaaacagcccccaaccgagcaaaaaaaccgacagccaaggcgagcagaagagaagagaggaccacaccagaaaaggggaggagacaccacaggaacaccccgggcagagagaaccagacaacacaaaacacaagaccaaccgagacgcggacaagggaagcaggcacccgggccgacggggcacaagcccccgccgacccagccccgggcaccgccagcagagcgcccaacacccgcaagggcccacacgggacccccacggaccaagacccgggagggaacaagcgccgccccaaccaacacgcggaaccgagacgcgacaagggaagcaggcacccgggcgacggggcacaaaccccccgcccaccgagccccgggcaccgccagcggagcgccgacacccgcaagggcccacacaggaccacaggagaccaagacccaggagggaacacaaccgccaggagcggcgaacaccagaacgggaccgcccgcaagaagagagcgccgcagagaaaccgcccacgaaacaaggagaggcacccccaggcgcaagaggcaacagagcaccgaagaacaagccaacaggacaacaaaacagcagccagagaaccagaagcaaaaggcaaacgaagaaccacaacaaaaacaagaccaccaccacacagaacgcagcaccccaccccaccagccgggcaccccaacacaaccgaaaacagacccagaaaaacaccagagagaagaggacacaagaaggaccaaagcacaaagaaacaggagagcacgcaaagagacaggcccaaagaaaagcaggaaaacacagccaaacaggagaaacaaaagaaaaacaggaaaacacaccaaacagggaggaaagaacaaaaccaacagaacaaaaggggaagagacacaaaaagaaaacccaaagcgaggcaacgcggagaagaaacccaggaaagagacggaaccaagagcgagcacagcaacagaaacaagaaaggaagagagaaccagggcagaagaccaagagaacacgacacaacagcaaagaaaaacaaaagcaaaaggaccaaccaaaacaccaagaaccaggacacaagagaagaccaaaccacggaaaaggaagagagaagaagacaacaaagggccagcaaaccaacaaaaaaagaagaaaaccccaaacaaaaaaaaagagagcccagacaacaagaagccacagaacccaaaagacggaccagaaaagaaacccccgacacaaaaacagaacaacaaagcacaaaaaagaagaaaaaaagcagaagggagaaaggcaagaacaaaaaggaaggccacagaaacaccagaccaccagagacagaaagccagaagagccggacagagaacagacacaagagaacacaaagccagcccaggcacaacccggccaaacccaaaccaagaggagaaaccaaagaccacgacaaaaacaaacacacaaacccacgaaccagccccaaaggaaaaacagaaaagaagcaaacaaggacggaaacacgcccagaacaaccaagaaagaacacaacaaaccaaaaagaagacagccacaagaacagaagccaaccaacaacaaaaaaaaaggaagcacaaacccaaaccaaacaaggaccaaccccaaaaaaagacaagacggcacacaaacagacccaacacgcgcacaggaaacccaccagggaaaaagacagacacacccagaggaaaggcggaaaacaaccaagcaaaggacgaagaaacaagcggagagccaaaacggaaaaacgacccaacccaaagacaaaaaagacaaggagggacaccaaccacaaaggaaaaccccaagaggaacccaacgaaacacgcaccaaagcaagggcagccacacaagagacacagaaagccaaagcaacagcacccacacaaaaaggggagaccaacacaccacccaaaggacagacgggaaacagaaacaaacagggacacaggaaacaacagaagagaaacaaaggaccgacagaacacagaacaaccaaaacaaaaggaaacccccagcacccacgggacccccaaaagaccaaaaggcacaaaacaggcccaaagaacaaaaaagaaagcccagaccacagaccaccaggccaagacgaccaaaacaacaaaaaaggaaagccaacacacgggaaacgaaaacaccccaagaacggcaaggaaggaaaaagaaagaaaaaagacagagaagaaaagaagccacaacgacccaaaccagggacacaagaaagcacaagagggaaaccaagccgaggccccaagaagaaacgggagacagcacaacagcagcgaaaacacacaaaagcccagaaaaaaaggaagcaaacacccaagaggagagacggcaggaaaaacaaaccagggggaaacaaccaagggaaacaagaagaacacaaagaaaaccaaacgaggagggcgagaaaacaacaagaagaaaacccagcagaccacggagggcacagggacaaaaccaaaacaaaacagaaagaaaagggagacaaacaacagaccgaagaaaccaaaacaccacagacccacaaaaggcaaccaacaaaacggaaaaccggagaaaggacaaacggacagaaccaggaccaaaggaacaggacaaggaccacaaacagcccaacaccaaagaaaagaagcagaaaagccccaaccaaaaaaagcccaggaccagagggaggcagagcacagacccaaagaagacaaccagcgcacaaacacacaaaaagaagagaaggaccacccaaccaagaagccacaaccgaaccaaaccacagaaagacccaacaaagaagagaaccagaccaaccagaaacgagcaaaaacccaaaaaaccgcaaccgaaccaagaacacaaaagcaacaccaccgaccaagaggaccagggagcagggaggaaaacgaaaaccacaagaaccaaaaaacaaaccaaagacaaaaaccacagacaccgagagcagaaaaagcagacaagaccaacacccacagaaaaaggggaaagacaggaacaaggcccaaccaaacagaaaaagcaacacagcaaaccagagccaacacaaagaaaggagagaagcggaagcaacccacaaaacagggacagacaaggcgcccacccccacccaacaagacgaagaagccagagcaacgacaacaaaaggagacaaggggaacaaaggaaaagaggaagcaaaaacacgcagagaagaagaaaaaggacccaaaaacaccagagaacccaaaccgaaaacagccgggaagagcggaaaaaaaaaccaaacaagcaaggccccaacaaagaaaaacaggcgagaaagaaaagggaaacaacacccccaaagcacaaaaaaaaaaacggcggaccaacaaggaaggaaagacgagacaaaaaccaaaccgaagaaagaaaaaggaagaccagaagaggaaagaccccagccaggaggcaggacaacagaaaaaggcacgccaaaagcaacacagacaagcaaccccacaaaaccaaccaaccaacgaaggaaggagcaagcaaagcggaaaacaaaaaaccaggaagcaaaaagcccaaggaaaaagaaccggcggaacaccagccagaccaaagcacacagagcaaggaaaaaacgcaggacggaagagacagacaagagaccaaggaaagaagaagacccagaaagaacccacacaccaggcacgaccgacaagggagcaaaaccaccagggaagaaagacagcacaacaagggcggcacaacgggacggagaagaagcgaacgaccaacacccgacaaggcaaacaagggacaaggaaccacaaaaaccagagacacgaaaaaagaggagaaagggggaaaagccgaagaagggcacaggggaaaaaccgaacagaacagcaaggcggcgaagacgagaagacaaagggaccaagaaacccaaagcgcaaggcaaaagacaccgcaaaagacaaaaagaccaccaacagagggaaaggacaccaccaaacagaaggggacaaaccaacaaaaaagaaccaagaaggggaccagaaaacaaaaaccccaaaaaaaggggccagaacgaacaaagaaccaccgaggaaaccgaaggcagagaaacaccgaaaaaagcaacaccaacacagggaaagcaaacaaaacaacccgagaccacccacaccagcagaaggcaagacaaaaacagggacagcagagcggcgggagggagaaagaggaacacccccaggggggaggcaggcgacaaccaccggaaaccgcggcggcccagaaaaggacaagacaccggaggaccagcaaacccccgggcaaaccagaagagccccaacggaagaaggacacagcccacagcaagcagccaaaaagccagaagcggaaagaaccagagcccccaacagaggaaggaacagaaaagggacacacacaaggagacaccagcaaaaaagaagaaagaaaccagccaaaggaggaccggagggcacaccgaggaggaacacacacaaagaaaccacacaaagaccacgaaagggaaagccccaaaccaggaacccaagaaaagaaaagcaaacacagaaaccaagaagaagaagacgaaggggacacagccccccagagggaacaaaacacccaggaaggagacagagacaaagggagcgagagaaaggaggaccagagagacgccaaccagggaccaccccaaacagcaccaaacgcgacaccagcaacacagcaagaagaaaggacccagagagcgccggagacagccggggccagcaaacacagaagggagccacagcagcaaggaggacaagggacccaaggaggagcaaagaaagagccaaggagcaaagggacgcaacccaaggggaacaacaagaacaaccagaccccagagccgaccagcgcaagacaaaagaggccagcggccacacggaaagagaggcccaggacacgcagacgggccccggacaggggaacgccagggccaaagggggggagggggggaggggaggggggggggggaagggggacggaagcaggaaagaaagagcaaaaccaaaaaaaaggaaaaaaaaaaaaagagcagaaagaccgccccacgaggagcggaaaaacacaaagcaacagcacaacaaacaggaggaccaggaggaccaaggggccccaggccccagccgagccgggagcccgcaggaggggcaacaacaaccaggccacgacgggagaagggaccgcgcagcaggcacgcggaacagacaccagccaaggcaaccagaagaacaacagaaggggcggaacaggcagagggcagccaacacaagagggagcagacaagccagggagacagggacggaggagaagagccaccccgaggcaagaggagaagacgcaggcgaggagaaggcaaaggccacacccacaagacacacgccgacaaggccacacaccaaaacaaccacaccccaaaaggccaccccgggacaagcaagccaacaccacacagcaaaccccgacgagcaaaaaaaaaaaaaaaaagaaagagagcccaaaaaaaaaaaaaaaaaaaaaaaaaaaacacaagaccagggagcggggggagccggaagaaaggaagaaagaaaaacgccagaggccaaaagcgaaaaaaacaccgcccgccaaggagcagccaggaaaagaaaaaacacaaaggcagaacaccaagcacaacagaaaaggccagaaaagggacacacagacaaacaagggggcaaaaccaccaacgggcaccggacggcaaccaagaaagggcgacggaccacgagacagccagaagaacccagaggcggcaagacccgccacaacaacacaacaccccacacaacaggggagagaaaccaggccccaaagaaagcgaacacacaagagaaagcgaagaagcggagagagaccaaaaggcacaaaggacccagcggcccagacccagcaaacaggcagggcaacacaggacggcaggaaagcaggcagagccaggggcgcagccagccagccagcacgggagccccagcagggagagacccgccaaagaacaagggacggcccagggacccacacgaagggcccagcgacagaaccgacagggagggaaagccgcgagcagggaccgcaccccacagagacaaagaagaacagcaccccaggacaggacacacacacacacacacacacacacacacacacacacacacacacacacacacacaccggcacacacacaccacacacaccggcacacacgcagggcacaagcacaagaagacacgcaccgcccacacgaggacccgcgcaccagccgcgggccacccaagcgccagccgacacccccccagcacaggcggcaccagccgcgacgaaaggggcggccgaaagacgagcggcggcgcccaagaggcacaccccaacggccggaaaacaggaaaaaacgcgccggcacgggcccggggggggggagagggcccagagcaacggaaggcagggggaaccccagaggccccccgagccagcagaggaccagcgaccacagagcagcccacacgagggggggaccaccagcccgccaggagccacagcccaaccgcaacacccccggccccccccccccccccccaccccgccgccgcggccacgccaccaagcgcgaccaccccccacaaagcagaaaggaaaggcaaggaagggcaagggaggaaaggcaagggagagcaaggaggaaacagcaagggagggcaagaagggcagggagggcaaagagggcagggagagcagggaaagggcagggcaggacgagggcaggagcagcaagagagggacgcggggccccgaaccggagcgccacaggaggcggcggccacgagcccccaggacacagccgccccgccccaaagcgaagaagacccacagggaccaagacaccgcagcagccacggcagccgcaagggggacagagaagccaagacaaaacacgaaggcagaagcaaacgcacacacagccacaacggagcccaagccacccccagggagccaaagaagagcagccaaaaaaggaaggcgccacaaccggaccccgaagacagcagaccaccccaggggacaaggaacggcccccccagaaaaaaaaaaaagaagggaaccgagggccggacaccagcccgaacggcgaagacagaggcacagaggccaaggagagacgcacggggcaaagagaacgacacagagaagagcacgacacaaggggagggaccgagcagacgcccccccgggccaggggaccgcccggccagacaccccccccaggaccaagaacgaagccgggaagcgccgggacagccaagccaagccccagcccaggacagaaccacaccgcacggaaggagacccaagggagacgggcacccccccccaaagcaaggagcgcccagagagccacggagcagacccaggcccggggaaccggggcagaggcggggcccagccaagccgaccaacgaggccgacccgaaggaagagagccgacagcagagcaaccagacgccgccccgggagaccaacacaaggcaacaggggaaacaagaagcccaaacaacaacagggcccagcggcccaaaaggcaagcaagcagcgaccaaagagcaaaggcgaacaagcgaaacaggagccaagaaccaagaaaacaacagcagacaagaagcggggaaacaaaccaaaggacaaacagaccaacagaggacagcccgggaccagcagagccccgacaagggcccaggaagaaccagcacagacggcagcagcaccaccgcgagccaaccagacaccccgagaccccgcacagaccaagccacaacacagcaccgaaaagaacacccaaaaccaaacacgggcacaggacaacaacgaagggagaaccaaccggaaagccagcacaaaacaggaaaaacaacaaaccccccaagcgaggaggaaaaacacagccagggagagcacccccccacaagaacacgaagaacgcaaaaccaaaccaaagcagaacaccggcccaagcacgggaagagggacaaccggcacacagcaggggcacagaagcacacaggaacagaaaagaacagggaagcagcaaaacaaacagaaaacgaagaagaagaagcagaacaagacagaagacagacagaagaaggaaaaaaaaaaacccagccacaaagaaggagggcagaccacaccccagaggccggggcagccgagcggggccgggcaggaccaacgaggaggcagcaggggggggggaggccgcaaagcacgccccaagcaaacaaccaccaccccagaagcagccgcgcggcggacgcgaacagcaggaggaggggggggcgagcaacgggccccaccgagagcgacaaccccgagcagcggaagcagcaccaaccacaggccggagggggcagccgagggggaacaagaagcacaggcagaaggcgcccacaggacagggaaagaaaccccagcggggcagacccaggacggcggcaagacacacacgccgcaagaaaccagccccagggaaaaagaccaaaaagggaccgggggagaccgggcacgggaaaaaacagggaaggagccagcacccgcacacccaaggagaaaaccaaacaggccgcgcacacacaccacccgggacacagagagaggaacgggcagcccgagcaccgacccccaaccggcccagagcaaagaccaccaccccaggacacaaccccgggaacaccccaggcgggccggaccaccaacacaaggcccaaacagcgagacccaacagacaagaagggaaggacgagagaaagacacgccccaagccaggcacgccccacacgggaaagaaaccaacagagaaacagagccaagcagccgggaccgaaccccggcgcggaggcgaggcaggagcaaaaagccaggcagcccgagacagggaaaacccgccggcacacacacacaacaaaacacaggagaaacaacgggaaagaccgaaccagagcaagacacagaaacaccagagccgaaccaaaggaagggaaccacccccacccccacccccgcccaccagaggccgcccaggcacacaggaggcaacgccacccaccaagcaaggagggcagacaccggaggggaggggagcggggccccgccacaccgcacgcaaacacagaacaagacccacgcccccaagcagagaggcgcaaaacacgccaccacagcaggacaaaagcacaagcccagcgcagggggaccagcggccaccaggaaagcagaaaccaagaaaagaagccgggcagagagccccacggagagcaggacaacccccaagcgaaaccagggcggggccagcagcccaccaggcaccccgccccacagcccgcccgcccaggcacggccaggggaagggggggggggcgccggaggcccagcgaggcgaggcccacgcaggaggacagcaaggggccaggccgacccgcccaccgcggccgagagccgcccacggcccccaaaaaacgcccagggagaccgaaagcgccccaagaggaggaaagcagacggggccgagcggaacccccggagcgagccagcagagccccggggggcaagccaagaaccaaaagaacccacgagccggaaggagggggcaccaagacaagaggccgcagaggggcagaaagcacacagccgcaccggcgaccaggaacccgcggccccagacagaagaccaaagggaccgaagaaaaacacccccccgcgcggccccaaaccccagccgggaagaccagcacagagcagggcgggagcgaggaccaggagcaggcgcacgcgcagagccgggcaagcccgcccaacccgagcaggggggccgggggggcaagacgagcacgacgcagagccgggcagcagacggagagcaagaaccaagaaaacgagcacagacccgcaccacccaccggaagcgggggagggacgaaaagcgccaacaggcgagcccgagcgcggagcgacgcagcaaaacgggcagcgagggacacgcgggggaaagccagacgaaaagcacagcccaaccagggccagccacgagggaaccaaagcaggaaccaagcaggacaggaaccgaaggcaggagcgagcagaggccaggaggaggcgcacggcgcccagagccccagccgcccgggaaccagaaccacggcccagagaggccccgcccacaagggcgggccgcccccacaacacaagaagaaaagcacgcaggggccacacccgacaggccccaccagagacaagcggcaaggaagaaacacagcacaaaagagcggaggcacggagggcaggaccgagcaaagccacgcacgggcccaccccccagcgcccccaaagccgaccccccagcgccgggccacgcacaccccacgaggacacaaaaaacaacgggagcaggacgcacggagagccacagggggcgccgagccggcaccaagcaaaaacaacccagccaccaccgggccacacacaggaaaaaaccccggggaccgccacgagaccacagggggagaaggcacggacaaaaggcagaagacaaccaagcgaaaaacacacaaagggggaaacgacaccagaaaaaaagaagaacacagcaaaaaaaacaaacccggaaaggggggccacggggacaacaacacccaagaccggacaaacgggagcccacacacaggcagggcccacggccagaagcagcgagcgccgaaggcgagggagaccaaccaggcaaagagcaaacagaagcccccagaaaaggacccacccaccaccacgacggcaccgcagcggccagaacaccgaagagcaggagagacacaggccaggaccgcccacagaacccagcccccagaaggggccaacaagcacccccaaagaagccccagccaaaagaaggcaccaaagacccagggcacaagaccgcaccacagacacgggcgaccccaagagagcccaaaccaggggggcagcacacggcaacgagacgaggacagcccacgccccgccaggcccccgcccacgcccccaccccggcacgcccccaccacgcccccgcccacgccccacccagccccgcccacgcccacgcccaggaggaccaccggcccagggcaagcgccccccacagccacaggcagagcacagccccggcaggggggccagaagagcaagcagggcagcacccccgagccggcacagccgaaccccaggagacccagcaccgcaaggcaccaccacgccccaaacgcacccacccaaccccaaccaggcggggcaccaccacacagcaaaggaagccagccccagaggccagcacggggcaggaggaaagaaggcggggcaaggacaggggggaaaggcacaagacaaagggacagacaaaccccaggccacaacacacacaggcacgccaaggggccaaaaaaaacgggggccccggaaggaccccaggggcaaacaggcgcaccccaggcagcaacaccaagagcccccacaccgcacccccaggccccccagcacacagaccccaagacacccggaccaggcagccccaacccccccccccccccccccccccccccccaaacagccgaaccaaccccggagccccaaaaaaagacccccaagacccaagggcaagcacaaaggagggggccgacagggagggcgcggaggaagggcacagggggggcaaggcccgaggcaacacggccaaggcacccacccgccacccgaacaagagagaacccagccccgacagcaccagcgccaggccagagaaggacgaacccgaaacgaagcacacccaaaaggccgaagagcgaggacagggcccacagcaaaaaacccaacaagaacccaggacaagcaacgggaaaggcagagccagcacaggagggggggcagcgccaagaggggcaggccaagggggcaagcaggggacaggccaacaggggagcaagcaggggcaggccaacggggggcaagcaggggcagcgccaacgcggggggggggggggggggggggcagacacagggggaaggcaacaagcagacgagcaacccgaacaccacagcccagagacagggcccacgcgaccagggcggccacgggagagcaagagacgagccaggacacccaggaaccccccgccccccaagaaagaacaagcaaaccaccacaccggacacacagggacaaggaaccccacgcgacgcaccccagagcccgcagaagagccaaagaggagggccaggaaagaacggggaaagggccaacacagcagccagacacgaaaagcaaagccaacaaggcccaagcaaccgccaaaaagacaaaggaagggaaaaggaaaaaacaagaagaaaaccaaaaaccccaccaaacaaaacccccaagcacaagcaaaaaaggaagccaacggacagggccacggcccaacaccccgcccaaaagcaacccagaccaaacgggccgggaaccagcccaagaggacaccaccgaacccggccgaccaccaccacaaggagaaagagccaaagccgcggcacaaaggagacgccaccgggaaccgccaggcggaccacgcaaggggccagccgcagcgaaggaaaccagagaggggccggccccagggccgcaacaaagacaaaggggaaccgaagagcccgggacaaaaacccacggaaacccagccaaaaaccccacaaaacggccacaacccggagaaagcccacaccccaaggacgaagacgccagaccggagccccagagacaggaccaagggggacaagcaggccaggagcccacagcgccagaggggaaagccagaaaaacacacagccgaagccagagccaagcaagccaaaaagcgcccagggacgaaagaaagcacaccgcacgcacacaggaccagaccagaccggaagcggcaggaccaggacgcccccgaggaacgggcccgggccggagcacaggaggcaacgacagaaccccgaggcacaagcaggcaaaaagaacaccaagacgcaagcccacacaccaggaccagaaccccacagaccaccggggcagaaccggggagcccggcaaccggaccacgagaccaggcggcccacccacagagaccaccgcccgaggcgggacaaagggggccacacggagagaggggggcaggggcggcacagacagccggcccagcgagcaaaggcggaacccgaggacccgagccgaggaaggaccaacagcccgggccgacccacaaagcacgcccccacagcgcccgcaggagaggggggcacagcacgaggagcagcaccaagccacagcgaaaaggcccgacccccccccagccagccaagccaagagaggaccgcggaacccgaacacccccaaaaccaaaaaccaccagggagaaaggggagagaacacccaggcgcgagggccaagagcgaacacgggaagagacccccccgaagaagcacggccggaggcccacgcaccccacggaagcgcccgggcccagcccaacccaaccaggcagagggccggagacgaggaccagaaagcacggcagagaccgcccccgcccgcacaccccagccggaaccccacaccaggccggccagagacccgggaaagcccggcaccagacccacgagaaaagggaagaggccccacccaaaagacgcccggaccggaagcaccgggaacaaggagagagggaacacagcgaggcaccgccggggcccaggacccagcaggagagagggaagaagagcagggagaggcaggggagcggcagagaacaggcgccagggcgcggagccagcccccacacgccagagaaacaagagccgcaccaccggccagggcggggggagccgagaaaccacacccggggacgaggcagagcacacaagcccgccccacagaccggcaacaacagggcgccgacccacaaaaagaggcacagcccccccacccgcccgcccaccccccccccacccccccccccccacggccaggccgcccccccacccccccccccccccccccccccccccccccccccccccccccccccccccccccccccccccccccccccccccccccccccccccccacccccccccccgccccgcccacacccaaccccccccccagcacaaaaaccacagcgaagcaccccgcccccaccaaccgacacaccccaagaacaaccccacaaaacacacagagggaagcccaaaaccaggacagaagccccaacgcgagacccacagaagccagaggacggggcagggaaggcagaaccgcaaacccgcaaccgcccggcggcccagcacacaaaaaaaaccgcgggcgcagacggacgggggcgggggcggcccgcaggaaagaaaagacccaggcgaggcagcaggaaggagcagggccagaaaaaggacggaaaaaacaccggcggccccggaaagggcagggagcgcgggcccaagccggccgcccacagcgcgagcgcggagaaggcccgcggacgggagccggcagaaccagcgaaaaaggcggacggcaccggggaacgcagcaggacggagcaccagaaagcaccggacaacagagaacaggaagaagagggggaagacccaccccgcaaggcagcagaacaccggggcaggccaggcaaaaaaaaaggagaagcaagcgaaaagcagcacaaccccccccccccccccccccggggggggggggggggggcccccccccgggggggggcggggggccgccccccccgccccccccccccccccccccccccccccccccgccgacgggagcaggggccagcgcccaggcccggcagccagccccaccagagacagaaccgcaaacgcaaacaggaaaccccccccaagagcggcgaagaacgagaaaaacaccaacacgcaagaggacgcccccaagcccggagaagaaagcagcgccagcacgggccagacagacaagcgagcaacagagaaaacgggcaaacgaggcgagaggaggcaggcacaggggggcgaaagacaccggccccaggcccccccgcccggaccacaagaaaaaacccaccacacaccccaccccagggccgcccacagagacaagccaaggaccaggacgaaccagagcgggcaggcaagagaacaaagggggacaacaccaaaagaaaacacagcacaggacagggcggagaggggaccaggggcaggagccacccagccccaaaacccacggaccgagcacccagagccagggggagacacacaccgaacccagcaccaagagacgaggcacaaagaccaagagccaaagcaccccagggaacaaacaaagccaaccaaaaaccagagaccgccaaagaaggaaagcacaggggacagaagccagaaacaaccgaaccgacacgcggaggcaaggcgaccgccgccccaaaacacaacagccacaaacagccacccagaaggaagaggagaagggaagaagccaggagagaccaaccacggacaggggcacaggaaaaaagaaaggcccagggggacccaaggaaaaggcagccagcaggcaaggagagcccgccgagaacccagccccgccacaccggaccaggccggccgcagggcagagacagaaagagcaagccccagaccgaaggccagagacggagcacgggcccacaggacagccggccgggccaaggcagcggagaccgaagaaaacaaaaagccaaaaaggagcacggccgcccaggcacacacagcaaacaagccaggggaagcggagacgccgcagcaaaggcgccgcaggcagaggccagggaaaggggaaccccccccacaggggaccaaagcccaacacgcccacccgagcccagaagagagacagaacccccaaccgcccaagaggcgaagggagggccagaaagaagggcaggggacacacgagacggccaggggcaaaggcgcgcccaagcagaggacccgagcacaccccaacaccaaaaaaggcagcgcagcacgcagcagacgcaacccagaacccagagccgcggccagccagcaacaaaagccaggacaggagggacgagccaagaaaaagggacgggacgagggaaaacacaaaaggcacacaggcccaggcacacacacaaacaggggacacagacagcacaacaggccacacacagagaagaaaagggagaggcggagaacgaaccagcagaagaggcgcaacccagcacccacgggagccacaacccgcaacccagaaaagagcgggggggggggggggagggggaggagaaggggaggggggggagagcgggcggggaggggcaggcgcgcgggggaggggaggggagccgggcagggggcaggggggcaggggggcagggggcagggggcaggggggcaaggggcgggggggggggggggggaaagaggccaggggacaggagcacggacgcaaccacagagaaaagcaggagcaaaggagcaaaacgagcagaaacacacagaagaaaaagcacaagcgacacgcagacagaaacccaggccagaaagcgcccacggccagacgaaaccagggcgacagccggcccagggcacgccagggaggcaacaaacccacacaaaaaaagaaaaggcagggagaaaaagaaggaaaaaaaccaaacagacaagggcccaaaaaaaaagaccacacgcaggggcccacccaagccacagcaggcagagggcaggagcgagaaccaaaaccaacaagggagcgacagaacaacaacagaccaaagaaaacagaagacccacacgaagggagaagcccaggcaggcccagccgagaagagcccgcaggcccgaggcaagcaacccaacaaaaccacgggccaccaaaacaaacaaggaagagcagaaacgaggggggggaagaggagagggcaggaggaggagggagggaaggaggcaagaaagcagaaagaaacagcacaggggcaccaggagcccgaaaacaaacaaagacaggaaacagaacccccagcacaaaccccaggaccccagaaaggcaaaagaaacccaacacaggcgacagcagccccaggaaggacggagaaggggccgaccaaaacagcaaacaagacacaacgcccccaaccgcaggccgggggcggcgagcgagcccgacccgccacaggcacaagaaacacagacgggaagcaggggggcggggggaaggggacagggaaacaggagccagccccagccccgccccaccccccccccccggagccagagaagacagacaggaggggaaaccaaaggaaaggaagcagccgcaccgccggccggagcaacacgaggccccagaaggccgaaggagagcaaacgggaggagacggaagccggagaccgagaaagcaaaaccgccggcaggcacagacggacgggccgaggcaagccagcacagggcgggacccagggaggccccaagcggccaaggagagagacgcggaagggcaaccacagcccccccaaggc

SEQ ID NO: 792 - RNA, 9514 nt, Mus musculus
  misc_feature (2912)..(3115): n is a, c, g, or u
agcgacaccagaaagaaccgggcccaggaaaaacaaaccggcacgagacaggagggaggcccagcacagagaagacacggcaagacaacacaagcccgaccacaccacaggaaaggagcaaagaacagggcgacgcaccgggccccaggcccacaccaggaagaaaggagccagccagagggcaacgaacagcgaccgagaagcggaggaacgaagggacaaaggcaaccccaggccagcccaaccgcagagggaagaccggagccccccgaggcaggcagggcgcaaagggaacccaggaaaccacccagcaggccggaagaggagagagcagggggaggcgccacagggagaaaaaagaagaacaaagcccaaaagacagcacaaaaaccgaaaaaaagcacgcaggcgccaccggcacacacgaaagccggcgaaaccggggggggggggggggggggggccacaaacaggcaaagcaagacgaaaacaaccgggaacaggagccgaaggaaccaacccagaacgggcaggaaagaaaacaggcccacggcgccaaagcgggcagaaaaccagaccacgggaacgcagaaagcacacccgagacaccccaaccccagccaggagccaaccaggcacacgcagggccgaaccacgggaaagccacgcccgccagcagagcaaaaggcacaccagcaaccacccaacaaaacaccggaccggagagaaaggaggcaacagacccacgggcaaccaaaagaagaaaaaaaaaagacaccagcacccaagccaacaacaagaggccaagggccccccagcgccaaacagcggcaaacgacaagcaggacaaagaaaacacaaaccaccgaaaaaccccacacgcagccacagcccaaccccccgcgcgccagggacagaaaaaaacaaacaagaaacaggccggcccgccacgggaaaaaaccacgagaacagcagcaacaaaaaaggacacaccaccccgacccccaagcccaagacacccccaacgaagacagcagcaacaacaacaacacacacagacacagacaacaacaacaacaacacagacaaaacaacaacaacaacacacaaaaacagacacagcgaaaagggaaaagcagacaaaaaaagagagaaaagaaaaaaaaaaagcgcaagcaaagcaagccaaggcaaggaggaaagcaccacacaggcaaaggaaacagccagagacaacacaaaagacaaccccaccagcaggaacgacagaacgagggggggagccgaaaacacacagaggcagaaggccggcgaccgaggacaagcgcaggagcagcacaagccagccaagccagaagacagcaccacacccgcccacggacgcaaccaccccgcagccgaaccggcagggaaagaaaaaccacccagagaacgaaacccacgcccagggagcacacaggcgcacaaaaagggaagacgaaacaagggggagccagccaagccgagccaccccagagaccaaacggaagcgaagaagcagagaacggaggagccagaaagcgaggaaggacggacaggcaaaaaccaagcaaggcccccaaggcccagaccagaaagggcccccggggagacaaagaaaggcaaagccccggcgaggggaaggacgggggcacacgagcaagcagccagccggaaacgcaaccgagaccacccacagcacgggccaacccgagccgagaccaaacagcgccacaagcgacccccaaccaaaaacaggaccaaacgaagcacgaaaagggaaaaacgaagcaggagacaaagggaccccggaaaggccagaccccaaagggggagacaaaaggagaacacgccaagaaaaccaccagcaaaaccgccggcggaaaacaaaggaggaggcgaagaacggacagacagcagagaacaagcccaccgaccagccgcaggcagcccgcagcccaacacagaggcaggaccaagacagcggacaggacagagaaaacaaccagagggacaacgcagagaaaaggacaaacaacaaaaagcccaagcaaagcaaccacaagaaggaagaggaacacacagaccggcgcagcaagcagggccagaaaaacagacaaagaaaaaagacggaggacaaaaccgccaagcacacacacaccaaaaagacagcaaacaacaaaaaccagaaaccaaagcaacagcagaaccaaaacggaagagggacaaccaccacaagaacgaaggcggaaaaccaagagcaaaagcaggcacaagacaaaaaagggaaaaacgaagaaaaaacaagaccagagcccaccaagccccccccccccccccccccccaccacccgcgccccaacgcagagcaacaaaaacgacacagcggaggaacgccgccccagccacagccccacccccaagagcaacaaaacccggcaagggccacggcagagcacacaagggagcagaggaaaagacccgccggagcaggaagccccgggaaggaccggggacaagcagaggcgacagcaccaccagaacccagcagcaaggaggaggaagggaggcaccacacaagaaccaagaagagagacaaaacaaagaaaaaaaaacccagacaaaacaaccccagagaaaaccaaaaccagaaccaaaagaagcacacaagaggacaccacccacacccaaggagaagccgcaagcaacgggccaacaaggacccaaaaaggaggaagagaagggagacgggagaaaggaggagggacaagaggcaacacggcccaagggaacgggaaacgcgcccacaacagaaagagcaaaccgagaggagaggaagaaacaacaaccaaaacccccccgccccgccacccgcccccgcccccccccccccnnnnnnnnnnnnnnnnnnnnnnnnnnnnnnnnnnnnnnnnnnnnnnnnnnnnnnnnnnnnnnnnnnnnnnnnnnnnnnnnnnnnnnnnnnnnnnnnnnnnnnnnnnnnnnnnnnnnnnnnnnnnnnnnnnnnnnnnnnnnnnnnnnnnnnnnnnnnnnnnnnnnnnnnnnnnnnnnnnnnnnnnnnnnnnnnnnnnnnnnnnnnccccccccaccccaacccccaccccaacaaccaaggaaacaggccacagacccaggcccccacgccggagcccaggcgaggcgcggaacccgaccccgccaccccgggcccgaggccaggcacaggagccacgcagacaaaagaggaaaggcaagacaaggcgaagcccggcgccggaaccaccgagaccaggcggcccgaaccagaaacaccgcccgcccccaaggcgggaaaaggggcgccacacgccggcaaacggcggccgagggaggcaggaggcgggcgcagaggcccggaacagaaacaggaggagccgccgccagagagggacaaaggaaagcagccaggcccagcaaaaaaaaccacgaagaaacaaaagcagcaaaaaaagaccaaaccaccaaagagaccagcccagaaggaccgagaacagggagaacaaaagggaaagcaaggaacgcacagccaaacaagagacaaagagcccagcaggggccgcagccgacacccaagccccgagagagcccagcaggaagagaggaaacaagcaagcaaacgcaaaggaagaaacagaaacagaagacaaagccccacaccaaaccaagcgcacgcaccgcgaaggcagcacacagggagccaagagcaagagccaaaccaacaggagggagcccaggagggcccaaccaacgccaagccagaagccgcgacaacagcagaaggacacagcgaccgcagcagacggacaccaaagcaaacaacacaggggcaggaagaacacacggggggacacaagaaaagacacacacaggacacagcccaaaggaggggacggcgagagagcagaggacaaaccaccaaccaaaacaaacgcaggaggaaagacgcaccagggagaaccgaagcaacacccaaaacacacagaagcaaagaagggcagcggagcacgcaggacgcggcccacaaccaaagaggcacagcacacgaggccaccacggacacacgagaccgccagcagacgcgcaaagccccaacgccccaccgggccaacacacacacggacaaaaccagcagaaggggcagcggaaagccacccagaggcaggcagcgaaggggacagaaacacgagaagccaaacaaagacgaacgaagagcagaaagaagcaaacacaaggaacggcaccgccccagcgcaaaaaagcaggacaagacccaaaagaaagcggggcaggagcgcgaaaggacccggggcagaaggaaagagaccaggagaaacacacaccacagggagcaacgacaacaagaacaagcaagcacaacagcaccccccacccccacacagcccacagaagcccagcccccgcccgcgcccccacggagcccgacggaaggagcccaggcaagggcccggggcacgcaccacaagccccaggcagaagcaacaccccagggccgcacaccaaaacacagcggcaggaaagaagaggaagaaagaggcccgaaccgaaggaaacaagagaaacacccacagcaagacacccaccggaaaaagaaagcgcagccagacgggcccagaaacaaaaaaaagacggaaaaaagaaaacaaaaaaaaaaacaacagggacgagaaaccaagacgagaagcaaccagcgaaggcgaagaagaaaaaagcggagaagaaaacgaaacaagaggagaggggcaaacggcccacaggagaaaagagcaacgaaccgcgcgacaggaccacccgccaaaagacagaaagggcaggacacccgaacgcggaaaaaagcagacaaagacagcaagaaacaagaacagcaccagagaggaccggaagcccccaccccacaaccagcccgccccaccacaccaacaccccaccgaggacaaaagccccccagagcgccaggaaccacgccagggagcggggcgaccagaacccagcgagaaacaacccaaaaaccacaaggcccgcgccgagaaaagaaagccaacggccacaggacagccacagagcagggccaggcaaaacaaaacccaaaacaaaacaaaaaaacaaaacaacagaaaacccgggaaaggaaaaaaaaaaaaaaacccggagagaagagaaaacaaacacagacgccagcagagcaagagaaacaggccaggaagcgcaaagagcagaccaaaaccaggcacccagagcggaccaggaccagggccccagaggcagcacgaagcaacaccaggcacgcggcgcaggcacggcaggcacacgaaaaaaacaagggacggagcagaccagcccaacacggcaaggacggagaaggagggcccaccaaggaccacgaccagccgacaggcacggagacccgacgccccaaacagcccgccggcggcaccccccccgcacagccccccccccaggacacaaaccccacgccccccccgacaaaagaaaggaacgagaagccacggaaaagggaagacagaaaagcaggggagaaaaacgggagagcccaaccaggcggaacaacgaccaccacaacaaaaaaaaaaaaaaaaaaaaaaaacccaccccaaaacagaagaaacaaacaggaaacaaacaacccccccaacaaacacagcgaaagcaaacagaacggccccaagcaagccgacgagaagaaaaagagcaagaacagacaggagaagcgggggagaaaacagacagggaaagcaccagacggcacagcaggaaagagcagcgggaagccacagacggggggacaggaccgccacacacagggacaggcggcgggcgccccacgccaccacaaaaccagcgggagccaccccaccgagcacacccccagcagccccgcccccgccacagcgccagacgccggacccgggcggcaagcggggccccggagaccaccaccggcaggcccgcggcacagcgcgcagccgcggggacaagcgccgcacagcgcacccaaggcagcagagggaccgaaggacacgaccgccggcgcagcaggggggcggggggacgaacggccccacaaggagacacgccaggacagggacaaggaagaaacagcacggaccccacacgccaaggcaaagacaagcaacgcagacgggaaaaccaaaccgcaacgcacggaccagcagagcagcgaaagcggccagaaaagaccccgccaccgaaccacaccaagggaaaccacaggcaggaggacggagcgggcagcagaaaggcagcaggcagccggccccgagggggcccagaggaaggccgacaggaaggacaaaaacccacaaccgcccaaccaagagacagagcgaaacaaaaaagaaaaaaggcgcacaaaaggcagggcagccgggcacaggacgacgaccacaaacaaagacggcacgccaaagcacgacgccccaagggcggaagggaggcaggggggcggccgggggcggccggcgggcagggcagaaagacgcggggcggcgaagagagacccacagagcagcaccagcacgggcaagaaaccaggacccagagaaaacaacggaccgaaggcgccgaaacgcccagccaaaccaaggagaagggccccacccacgcaaaacaaaacagacccacagccggcaagagcaagcagaggagagaaaggagagagaggaaaaaaccaacaacccaaaccaccaaaccacaaaacagaagaacaagcacgacgacacagagggggcaaaagcaagaaagacaacgagacagaacccccgccaagaacgaggagggaaacacaagccagacaaagaaacagaaccagaaaaggaaagaagcaaggaggggaaaggaagaaggacccccagcagaacggaccacggagggacacaggcacaacaacaaagaagagcaaagagcgcccgcgccggccccgccgagcgggaggaagaaagagcccccgaggccagggaggcggccccaggggaacgaggaaggacgagggggggccaagcaccggggccagcgaggcagagacggggaccagggcccgacccgcaggaaggaagggagcagggcgcccagcggccccagcgcgcccaaccccgccgcaggaccaaccgggcacgaagccagaaaagccgaaggcccggggggacacagaaaagaaaaagcaccggaggcaaccgacacggggaaccccgcccacacagacaagaggcgcagagccgagaacaagcccgccaaaaccaacagaaggcaaggaagcacaacaacacgaacagcaaaggaaaaacaccacaaagagcaaaagaacagaaggcaaagcccccagacgcaaccccccaagaccggagcccccacacacacagaggagcggagccgaaacgacccagagccacgcgagcccaggggccaaaccagcccgcccaaccccgaggaacagcacacaaacacacaccagcacaaccagccaaaccccccagcccagcagccgccaaagcagccacaacacgaaaggaacgggcgccccccccccacacacagaaccgcccacagagacgagcccaccaccagagagacacgccacaaccacgcgacgcagccagccggcccacacccccagcaggcacccgccccggcacaccgagaaggcgcacccgccaggggcaacccagcagggacggcggccaagagcagcaaacagcccaggcaaaccagcagaacccggcacccaccccgacacacagcccagcggaacccgcccagcgaccagcaccaacgcgcgcccaaccacccgcagcccgccccaagccgccgcgaacgccccgcgacagggaccgcgagccccccccccaaacaagccccagaaaaccacagcccggagccacacgagcaaaaagggccgcggacgcccccaaacccgacccaccgaccagcagaagaacccgaaagcacccaccaaaggcaacccaggcccagcagagacaccggcgcccaagaacagcacgccgcaagccaaccgacccccccaaaagaaggaagcgccagcggccacccggcaaaggccgacacagaggaggcaccagggggggaaagaaggaaaaacagaccacgaacaagcggagaggggaggagggaccaggggcgaagagccggcccacccccaccccacgggccacgcagcaaggcgcccgcaggaacaccaaccagccagcgacgagcccccccgccacacaaaaaagccacagccacgagacaccgcgagacaaaggcccccgccgaccaccgccagacagacgaaaacacaaacaacaaccagagagcgaccaaggcacacaaagggcggcaaaacaccaagcgacccaaaacccccaacaccgcgcccacgggcaggagaccagaaggcagaagcaacgaggagcgcgccagaccaggaaaaaacaagacagcccccccccgcccccaagccccccagaagggaagaccgccacagagacccacaggaaagcaagcgaggcgacgacagcccgagggaagagaccccagccgagacccgcagaccagaggaaaaaggacgagaccagagaaaacagggagaccgcaaaacgcaccaggaggcgggccagaacccaggacccacacccccaaccgcggcgaacccgcaacgccacacagcaccagagaaccaggaccgacaccgccccccaggagcccccaccaaccaccccaccagccacggcagcaccaccccaaaggccggcggccacaccacggggggagggccccccgaagaaccaacaacacacccccgaagaaccaacaacacagccgccgagagcgccgcggagcccaccagggacgccggaacgaccaccgggagagaacaaaaaacggaagaaaacaaccagcggcaaccagaggcacagccacacacaccggcacccccagaacagggaggaacggaccccacacgggccaggggcccccgcggggccgcccagcgagagaccaaagacgacagccggacagaaggcacagcgaccgaacacccgaagaagcaggagaccgaaccaggccacacgcagacaaccggagagccgagccccacgagccagacagcaacaagcagaaagcaaaaaaccccccggagcgcccacaacccacgaccaccaacacgaagagcaaacgaaaagaaacgaagaggaacgaacgcgcggcccggcacgagaggaaagcaacgcaccaacccacccagggaaaaaggacacaaaaggcaggggaacggggaaacggcggagaaagggaaaccggacaagaaaaagacaaaaaaaagaccaaacagggaaggggagcagacagggcgcaggaggcgcaaagggcagcaaaacaagccacaagaaaaacagacccagcg

SEQ ID NO: 793 - RNA, 6764 nt, Mus musculus
gaacgaaacagagagcgaaaaaaaaacagccgagacaaaaaaacgaagaaaaaacacacacgcgaccccacacaaagaggaacagacagggggggagcacaggaaacagaaacaaaccagcggaggcaagagagcccccgacggagagaggagcagccaccgcacacggaggcgccgggaaaaggccagcacggcgcagcgagggacccacaaaggaaggggcgaagggcccgaagagcacccccagagccccccaaacccccccccgccaaagaaaagaacaacagaacgagcacggaaggaaggccgccccaccggacacacagaggcacgggcaaggaagggggggcagggacagaaagaggaacaagccgggcaacaacaacaaacaggagacccagaaacacaagcgagccagggcgcaaaagaaacaaggggcagagccacagaggaagagcggaagggagcaagccacacagggcacacaaaagggcagcagaaggggagcagggagggaacaagggaggaagcaacggacagcgaaggagaaaaacaagcagcagaaaaagcgagaggccaagacaaaaacaagcccgaggaacgagacacccccaacagaacaaaaaaccccgcaaacgacaaagaaccagaggaccagaaaaggcaggcaaagggacagacaggccaggagaagaaggagaggacgcacagaggaggaaaaaggcagcaagcacaggggggcgagaggaagaccgagcccagcacagcaaagggacagggccacaaggccaagaacaaaacaaaaaaaacccacgaaaagaggcaccaggaaacccccaaaacaacacaaaaccacaccgaggaaggaaggacagacgggcaggagacaaaggccaggagcagcaaggggcgggcaaagcaggaagaagagaagacagaaagacaagaggcccgccaggaaacgcccagacccccgccccaagcgaacacagcacccaccccagaagacgggcacccagggagggaaccccaagaaagggaaaacccacaaaaacagaccagaaggcacaacaagagggaaaccacagaaacaggacaaacgaaaaaaaaaaaaaaaaacccaggaaggagcccagaggaggaccagacaggcaaccggaccaccggcaccgagaggaggacaagaccagggcaagagggcacagcccccgccacacagagaggacaagcagacacaagaaagaaggcacaggcaggccgggaagagaaccacagacaagacagggcacgcaaacccaaaaaagagacgaggcaaagagacaaacggcgcccagagcaggaacggaagcgcaggagcagcgggacacaaagccagcccaccaccacacacgaaagggcggcaaccccgaggcaaagggcacagagcaacacagaacaaaaggaaccaaacgcgacaaagcagaacccacccaaaagaaagggcggaaaacagacaggaaacccccaacagaaacaggagcaccccccccccaaaagccaaaccgagcagaaaacaaaaaaaccccaaaaaacaaaaaacaaaaaccacaacaaaaaacaccaaacagaaaggacaggggaaaaccaccacaaaacaggaaacccgaacagaaaagaacgcaaaagcaagaaccgacgaacaccacaccgagcacagcccagcgaggcgcaaaccgagaaagaagaaaacaggcgaccgaaaagcaacaccaaggaaaaaaaaaaagcaaacagcacaaccaggccagcagggagcccggcgaacgaagcccagacgaaaaccagccaccacagaaccagagagccccaagaacaaaaacaaaacaacaaacacacaggcccccccgcgaaccaggcgaagaagcaggccaccgcccagagcccggaaccacggagagaggaaccgggaagccgaccccaacgacagagacccccagccaggaaagccccacagaagagccagccggcaggcagacagccacagcaccaagcaaaacggaagaggaagccagagaggggagaaaggcaaaggggaggggaggcgccgcccgagacagcaacagaagcgcggaaagcaaccaccacccgaagaacacaggaaagaaagaaaacgaagaacccaaaacaggcggacagcagcagagagggaaaaggcaaggacaaggccacacaaacgaagaaaaagcacacccaaaaaacaaccaacgcaaaaaaagcaagggggggggagacagggccgaagccggcgccggaaccacgagaccaggcggcccgaaccagaaaccgccgcccgccccgaggcgggaaaaggggccaccaccacggccagcagcaagaaagaagaaagaaaaggacaaggaaaaggaaggaacaaaaaagcaaaacagcaacagcaacgacgggaaaagaaccaagacaaaaaagagagacgggcacaaaaacaggggcagcaagaaacggcaccaaccaccagaaggagggacggagcagaaaaccaaaggaaggcacgggaaaccaaacaaggcacagaaaccggaagggcgaaggccacaaacgaacaaggacagcggcgagaaagccagcagagaacgagcaacaggaacggaaaaggcggcgaagcgccgaaaaacgagagcaaagaaaaagacaacagggcggaagaccaccccggaaggcaacagggagaccaaggaccaaacagaaaacacacaaaccagcaggaaacagaacacgccaaagacaaacgacaaaagagaaacgcccaccccacgcccgagggcccaagccgaaaagcaccgcaacacgcaacgcgcagacagcgaccaaaggagagcaggacgaaacaaaccaaaaaaaaacaacacagaaaaacggcacagggcaacacaagcaggagggaaacagcgccaaagcaacggcaccagagagccaaagaggggcagcacagcaacaggggaaacaaaccaagaaagcccaagacacacacacagaccagagagacccaacaacagaacaaccaagaggagcagcgaaaacaaggccaaacacaaaaaaaaaaacagcacgagggacaacggcccaaaggcaaggcccacaacccagcacgaagaaaaagagaaaacaaccaacccaaacagggaagagaaggaaagcaaaagaaaaaaaggaaacaggacacaaacaaaaggaaacacacaaagaggaaaaagaggacgaaccacacgaaagggggacacacaacaaccccaacccgcaacgacaaggcacaggcgagcagcgaaacagcaaacagaagcaaccccaccacaggaaagacggcaggaacagccggccacaggggacgaaaacacacagaaagggaaccgacgcaacgcagagagaagcaaggagcagcggagacagagcccccaaagacaaacgaagccaagcagaaagaggaaccagcaagcaaaagagggcagcgacagagaggaaggaggcaagaagcaacggcaacgggagacagaccgaccgaacacaggagccaccgcccaccacaccgcccaccaaggagcagaaggaaaaaaaaaagacaaagaaaaagaacacagagggagcgaaaaaaagcacacgagacaggcaacagggggaagccagacccacgagccgccagaccaacagacgcacgaaacacagcaagagacggaagggggagacgaaagagacgccagcaagcgaccacaaccgcgaaccgccccccagcaaccacggaacaccacagggagaggggcagaggagccacgacgggccaaaaggggagggaaaggccagaaaagcaaaaaaaaaaaaaaaacagaaacagaacaccaaaccaaccagacacaaggaacgagaaacaggccacaagcaaagaagccacaaaaacaggcggcccaagggaacgggaagcaacaagacgaaggaagccaaaggaaacagcaggcgcacgccagagggaaacagagcaccccccccggccaacacaaaaaaccaaacagaaggaccaaaaaacacacaaaggcagaaagaagagacgacaccaacggaggaaaaagggaaaaagcagagggaagaggggaaaagaacaacaaaaccggcacacagcaggaagaaagcaccacccaaaggccggcgccccacacggcggggagccccggagagaacagggggggcccgaagggggagaagccccagcccccccgcccccccagagggccgccaggggcacacaccacagccccaaagcaacaaacagggaacaaggcgaaacccgaaacgacccaaagagacgacaagcaggaagaccacacggaaagccaacacagagaaaacaggcgacaagccacaacgaggccgaaaggcagcaggggaaagagagacaaagaaaaaaaaaaagaccccacccccaaccccaggaccccacccacaccaagaaaaacaaaaacaaaaaacaaacaaacaaaaaaaacaccaacacaaagcaacccaaaaacacaaaaagaaagcaagacaaggcaaaagaaagaagaccaaaaaaaaaaaaaaaaaaaaaaggcaaaaaaacaaaccaaaagaaaaaaaaaccacgagccagccaggggccaacacggggcagggagcgggcacgcgaggcagacagagggacagggagaaacgacgcgggcaagggaggagacaggaccccacggaaagaaaaagccaaggacaggaacagaaaaaaagaacccaggacaaccacaaaagaaaacaagaaacaaagagagaaaagggggaacgaaccaaaaagaacgaagaacaaacaacacaacggacggaaagaacgaagggggagccacacaggcacgggagaacccaggccgggaagaacgccaggcgagccacccagccccaggaaaggcaaaaccaagcacaaaaaggaacaaaaccaaccccaagagaaacaacaagaaagcaaaagcgaacgaagcaaccccccaccaaaaaacgacagagcccggaaaaaccgaaaagcgccgggccagggcgggggagggagagagagggccaggcagcccaaggaagcaggccgacagcagcagggccgaaaggcgcacaagcgaagccagggcagccggcaggggacacagggaaccggccacggcgcggcgccgcaagcagccgaagcagcccaccgcccggcaaggcagggggacaagagccaccagaaggacacgcccgcgcggacaaccgagagcgaagggcgacaaccagcccaccccaaaacgagggacggaggcaggaagacagccgaacgaaaaaaaaaagaagcaggacagaaagaaacaggacgagaagaaacaggagggcacgaaggccaaacagaaaacaaacaaagaaaaaaaaaagcacgggaacgaccgcgaaaggacaccaacacacaaaggagacggaaaggcgagaaagcaggcaaaacaagacaggacacggacagggccacaacagcagaagacacacaccagccaggccacgacaaacggacccgccagaaagcagaaacgggggaagagaagcacaccaggcagaagggacagagagagaccaagacgacacgcaagaagcgaagaaaaagccacaacgggagaaaggagacaaaaggggacaaacaacgggacaaaaaaaagaaggacaaagaacccacaagcgagccggaagcaccgcccacagggcgcagcagcccgagagcacacaaagcagaaccaaaaaggacccaacagccaaaagggggacaaaacagacagccaaagagaaaggcaaaaaaccacgcccgaggaagaaaggaaagacgaaagcgccaaaagagaaacaccaggaaagacgcaggacaacaaaacaaagccggaaacagcgggcaaccaacaaaagacagaaaccagcaaacaaacacaacgaacaaaacacaaacgaagaaccaaaagacgagcaaggggacggcaggcaaggaaagagcgcaaggggaagaagccaggagggaacacaccagcagcacaaacccggggcccccagaaggaaaggaggagaggaagagaggaggaaaaggacagcccagcagggcagaggaagcacacacagcccggaaggggaggaacccagaggacagccacagagaaccaccaacccgcagcaaaggaaaggacaagaagacaaaagcgcaaaaaaaagagcaaaagcgccaacacacaacacaggggagagacgagaaaaaaaaagcaaaccaaaaaacaaagaaaaaaaaaacgaaaaccacaagccaagacaaaaaagaaaaaacagaaaaaagcaaacgacacacaagacaaaaaaggaaagaggaaaaggagaggcaagcaaagaaaagccacacgaaaacaccaagacaacaccaccagaagcagaagggggaagccaaaaaaaaaaaaaaaaaacaaaaaaacaaaaacaagagacaagaaacgggaagaaggacaccaccaccgggaaagggagaagaaacaaagccccgaccccggcaggggcacggacgggaagggccggaaccagaaaacacaagccacagaggaaagagcacacaaagacgccgagagagcacgggaaggagaacaaagcccgaacacaggcaggcaccccccagaaaggaggagaagaaacgggaacccaaaagaaggaaaacgaacaaaagaggaaaagaaaaa

SEQ ID NO: 794 - RNA, 4537 nt, Mus musculus
agggggagccaaccaccaccagaaggaaccgccccacgcccgacccgccagcgccgccggccagcccaccagccagcccacgcaggaaaccagcagcgacccagggggcaggaggggaggaggagggggaagggagggagagagcccccgcccccacccccacgaggccgccccccggcccaccaccaggggagcccgggaccgcgagggacccgcagccccgagcgagacagcgaggcagagacagaggcaagccgcccacgacccaggccccaggaccgcccagccacccagcaagcaacgacggcggcagccagcggagagaaaagcggagaaaaggaccacagggacacggggacacccaggaacccgcggacccccaggcagagggcggagggggccagaccacagacacgaaagacacacgccacacagaacaccgggcacaacacgagacaggaccggcgacagcacacacacgccacagcccgcaaacagacagccccacccccacgcagaaacaacggaaccaaaaggcacagacaggacacaagcaccacccccaacaacacaagcggagacaccccaacacaaaaaaacacacgaccgcagggacagaccggaggcacacgacaaaacccagccaggcacccggggggcccacccccccacacacaccccgacacacacacacacacacacaagagagagagagagaaccagagcaaaccccagcccagcggcaaccccgaacccgaaccccccgggggggaagagccagccaacccgaggaccgggaagccaaacacacagggagaaggcagcggcagacccgcagccccgcgggagccccaggccaggcgggggccccgccgaaaccaggagcaacgacaaccccccacggcggagaccggagccaggagccagggcacgccgccggcagcacggaccagggccagggggcaaaccggagagcacccaagcagcggacccgacagccgcaggaaaggagagggaagagagccaagccgagggagccaagcccggaccgcggaaaacgaccgaagcaacagagaccgggcgccaagcggggcagcaagcagagagcccgggacagcgccgggcggaggaggaggaggcacaggcaaaggaagagaggaggagagggcgcaagaggacggccaaacgagcccacgcccacacgccgccgccccgcggagcgccgggaacgccccccggacgggaacaagggcccgccgcccggccggccccagggggacaggcccgaagaggccccaccacgagcgcggggggaacggagcgggggggggagggggcgggcgggcgagccaaggaagaggggggggggaggagcagcacggagaggagaaggaagcaggacagggagggcaggggaccacagacccaagagcagacggaggggagggaggacgccaaccaaaaggcgggggagaaaggcaagcaagaggaagagcaggaaagccccagaaggggaggcgccgcgaaggcagaaggcaggaggagggccgccccccaggccggagcaccccccgaaggccgggacacaagagagaaccgcaccccgggaagagggcgaggcacacggaagacccggcagggagaggcgagacaccgacccggcccccagccaggccaagcaacaaggccggggacaggccaacggagcgcaagggcccgggagagcgcagcagcgcgaccaccgaaggaggaaaaccagagcgggaggccggggaggaggccccagcacccccgacagccaaaacaccccaaggagggaggcacccacggggacaaaccccagccccaaccccagggacccgcaacacgccaaggaccacgggcccaggcccagccagggcgggagaggaagggcggggaccccacacagccaaccggcgacccgcagagaaaaagcagccccagagacggaggagaaggacggaggcgaagcggaagaagcgaacggcagcagccaagcgccggaggagagggcacagaagcgcaggaaacgaacagaggggggaggacagacggacagacagcggggggaggcggggacgggaagaggagaaccaaggcgggccacaaggaggggcgggagcaagacacacccaggaacccaggagcaggggcggaagaaagagaaagcggcccggggaagggaagggcggagcaccagagggaaagggggggagaggaggcccgagaagccagggagcacaacagaaacacggcggagcgggcagccccgcgagccacgggggggagcggagggggggcagggagaagacccacaagggcaacccgaaagcaggcccaaagccaaacgagagaggaagccgaccggggggacgccggaagggcaagaggacaggcccgaggccccagaccgggcaccaaccggaagagaggaagggagggaccaaaaccccagagaccacggcacccccacccggcagggaggccccggccccgacccggaccagggagggccgaaggccagccgccagcgagcccgagacccaggagacagccaggcacgggccaaggacaaacagagcgccgcagcgggaggcagggagcgcaggccagaccccgggggcaagggcgaaggggcccggcccgcgcggaccacgcaaggagcggcggcgggggaggaccagagaagagagcaaagaaacggagaggggaggcgccggggaggacccggcaacggcccagggggagggggagaaggcgccgaaccaaagggggggagccagcgagccaagaccggacaccggccaggcgaagcgggccggggacgcgaggaaccacacaagcacacgggaaggagcacaaggcaagcacaggcaggcacacggcgagcgcccaggaccgaggggaagcgcccacgggccaggggaggcaggggcgcaaccagcaagaccaagcaaagcagggaggagcgcaccccgcgcagccgaaccgacccagaggagagagcggggggcggagggacagggccaaaaaggggaggacgaccggcccggcgccccaccccaggaaggccccagggcgcaagcgggaccgaccgggcgcgcgagcccaacgggagggcgcggcgcagaggcagacgcccgcgcaaccagcgggagccgcccggccgcccggccccgggccacgccccacagagaggggcgccggcccccggggccccgggagagggagcgccgcgcaagggcagggggagggccagagcggggggcaggggaccgggaaccccccgcccgaaccgaggggaccccggggaaagccgccccagggcagggagccccgacagacaacaggaacgccaagcccccgcgcggaccgcgccgcgcccaccccgggggcggggcccccccgcaggccggccccacggggccagccggccgccccgccagcgaagggacagcccggccgcaaacccgggcccggcagccgcccggggcccagcccgcaccgcccccccgcagcgcggagcgcggggacgccccccagcgccgcccgggccaggccggcccgggacccggcggggcgggcaacgaccagccaggacgggagacccagaggaggggcagaagcccgccggagggccggaccccagcaggacccaggggccgcccacaccaccagggggcagcgagaagccccggaaagaaggcggaagggaggaagaccgaaggaccacggggcaggggcaggaaggggacgcgcgccagacgccccagcgagaccaggaggaagagcaccgccacaaaacgcccaaaggcaggaaaacgggaagcgaggggggggccggcggaagccaggagggcgcagggcacaccaggccaagccagacaggagaccagaacccagccaagaacaccacaaacccggggaaccaagcagccccaaccgcagcacgaaggacgccaggacagagaggcagagcagaaggcgcggaagcaaaacgggaaagcggccggaaaaggacccaccccagggcacacagggccgggaccaaagcacagagcacagaaaagggcgaaaccaccccagcagcggagagaggagggggggcagacagcacccccacccaccccaggcagagagcccggagagagaccccaggcaggcagggggggacaggcgccgaggccgccgggccagccccgcccggcagcaggccgaccaggagagggagagcccacaggagccaagggaaccagagaagcagcaaaggggcagcagcggaagcgagggagggccgggggcagccgccgggcaggaccgcccagagagccccggcgaccccacaggagcgagccgcaagaagcgaaagaaagcgagagcggagcaggaagccaggaaaaagcagaggcgaggaggagcggaagccgcacccaggaccagcccccccccccaggcccccagccgcggcacccggcccaggaaccgcagaacccagcagaacccccgaccaggcagg

SEQ ID NO: 795 - RNA, 486 nt, Mus musculus
cacagaacaaaagaaaacacaaaccacagcccccagggccaacaaaacagggcaaaacaagggaccgggcagccaccaagcggaggggaagaacaggagcggaagagagacgagggcagacaagaacgggaaggccaaacccaaaagaggaaccgacgggcggcgagaggccaggggaagagcacccgacgccccgaaggccagagcaaacccagcaaccacaggggccacaaccaccccaacaagacgaccccccagaggcgaagacacccagaggcgaagacagcacaggacacaaaaaaaaaaaaacaaaaaaaaaaaaacaaacaagaaaaaaaaaaaaaaaaaaaaaagaggaaccgacagaagacccgggaccagcccaggaagaagcacaagacagagccgcagagccggcggccggagcaccgagagaccacagcccagaccagaaagaaccaaggcccgagcacggagaaccacgcc

SEQ ID NO: 796 - RNA, 1279 nt, Mus musculus
gcagcggcgacagaggcagggcaggggacgagccagagccacaggccaccccacagccgcccggcgcggaaccagcaccacccagagccaaacccgccagggccaccccacgaggggacaagggcaccgccagggcccaaaggccaggggcacagccggcaagcaggagaagaaggaggaaggaaccaagccggcggaaccaccagagacgacagcggccagagggaagcaaaacaagaaccgaacaggcccgccggcccaagacaggaaccgccagaagagcacacccaggggaaccacagcacggccaggggagcagcaagagagcaccggagagcgacaaaagccgacaacccaaggcgcgagccgagcgaaggaacagcacggcgcggaccgggggaggcgagaggagccccagagccggggaagagcaacacaggaacacagaaggaccagaagccagcacccgacaggaagcagccacaagaagccaccccccagggaacagagcacagaggcacgggagggagccacgcacgggccgcgccccagaggcgacagaccggaagagcaagcggcacagagccacaccaggaacaaggaacacgcacacccgagaaacccccagggagcaccggaagaaacaaagaagccccaaaacccaggaaacccaaacaaacccccgcccagccccccaagcaggacgagcacagagcacccaacaggccgccacgagaacccgaccgagccaccccagacccaacacggccaggagagagaccacacagggccggcggccagccagggccggggccagccccgcccacagccccgagcgagcgacgcgggcccgggccagagccgccccgaaggcgcccccagccccgcccacccccacgcaaccaaccgcaggccagcccccccccccccaccaggggcccagccccaccgcgagagcgcgcccccggcccccagaggccggaacgcgcacccccccacaccaggccagggcccaccggccagcaggcgccggccggggacagcaccggagccgcccaggggggcgggccccagaagagagggcaagggcccaggcccagagcaccccagcacaaagagcggcgcaggcgcgccgggagcacggcccgaagccggcgagggaggagcgcgccgaggcccaggaggcgagcccgcaagaaagcaccagccacagcagcaacagcagacagacccagaccggcaaaaccacggcgcccgggaaacggcacagcccacaacc

SEQ ID NO: 797 - RNA, 10527 nt, Mus musculus
gcccagcccagccacccaagcaggacccgcccagcaacacacacagcgagcaacacacgggcgaaccgacccacaacccagaaaggacagccggggcacacagagcccacccaccacggaccagccccccccgacagcccacacagcgcccggcagagcaggggcagcgccacagcaaccgcagcaaccacagccacagcccaagcgggccccaggcggccgcaaaccgcaaaaggccgagaagacccgacccggccccccaaccgcgaggcagggcacaggcaggggcacggcccagaagcagcggggaccaaggggacggacacaggcaagcacgccaaccgagcgcacccaacaccacccccccacccacgcaggcacagacccagcgaacccgaccggcaccaacggcggcggccggaaggagacccggaagccagaccagcagaaagaaggcagccaaaagacaccccaccgggaggaggcaaagagacggcacgcgccggcggcacaggggggcccgaagcacaacaccgccagaggcaaggagaaagccgggcgcgaggggcagaagcagcagaaacaaaggagacaccaacagcgaagcaggaggagacaccacaccgcgaaggcagccggacgcgaggaaggcacgaacgaggggaccacccaaaagccgagcaccgcaaggagggacggccggcaacaggagcagaacgggggagcgagggagagaggcaggacggcagcgccaaaccacaagcccagcccccagggaggagagcaccaccacagaagcggcagcccagggaagccaaggagcgaggccggagaggccagaccaaggaggaaccagccaagggggacccaacccccaaccggaccaaggaaagccaaaaccaggaaacccggccgaacaaagaaaccaggcagacccaggcgccaacggagcccccgaaacaagcccacacacacacacaccaccacacaacacccaaacaccccaaaacaccaacaagaaacgagagcaaggagcggggaaagggaacacgagaaagcccaggaccccagaaccaacagggaccagaccaaaccccagacgaggggcggcaacaggagccacgacaagccggcagacaagggccccggacaggcacaagagccaacccgggcagggccagggcaggcaccgccccggacagagccaacggggacccagccccacgaaccagacccggcccgcccagcaggagagggcaaaagagggcggggggcccccagggcaaccacagcagacaggaagagggggagagcccagacacacccaccccggaacagcagggcaaccagcccccgcagacgccgacgaggagaacaagggccacccagcgcaaggaagcagggggaaaaagagagaagaggcacaacggccgggcaaaggcagagagcccggaaaggagaagaagagcggccacaggggcacacgcgccgcccgagggggcaacgggcaaggaaacccacgcggcccaacaaaacaaccacaaagaacaacccaaaagaaaaaagagaaacacccggggcagagagagggccgagggcaagaacaagcgcgcccgcggacgcgacccaacacccacggggcaaaccaacagcagccagggggggggcccacagagcacgcacacacagcaaacaggggaaacaccaacacacacacacacacacaaaaaaaaaaaccgaaaaaaacgcagagccccgcaagccagggagaggcggccaagcacaaggaccgggcagccaaaacaggccgaggcacagccggggcacacccagccaccccaaggagagcccacccaagccaggcggcagggacgaaggggaaggggggcacggaggcagaccacgaggcccccacaccgccgcaagcccaagcgcaggcgggcacccagccccaccgcacagcaccagaaacaccccacaccccgccgagaagcacccccaaagcgccccgacacacgccacagcaacccaggaaaaacagaacacccaaagggaaaaaaaaggccaacaggcccggaaagaaacaggggaaagcaggcccggcggaagaaggaaaaccgaccgcgggcaaggagagcacaagccacaccagaggcgggaggggacagggagaggcaaagggacgcgagaagaggaacaggcacccaggccccacacacgcgcagacgcgcgacaacgcagcaaaagcgcgggacaaagggaaggccccgaacgggcccccaccgccccgggccccggcgccccaccccaccccagcagcggcgcagcccccacccccagccccagcacagcccccccccccccccccgcacccggaaccggcaggcccagcaccccacccgccggccagggcagccgcacgccccgggagccacgccccaaggaggcgagagcccacccccccaccacccgccccccccagcccccccccgccccaggcaacagccacgcgagacaccagccggaagcgaaccaggagcgcaaaagggcaccccccaccggaagccaccaggggcccacaccccaggccaccaaccccacgggcgaacacaggaacagcaggaaaacagaacccgagggccggagcaccgggagcaagagcacggggaaacgcaccgagaccggacccaccacgcaagcgccgaacgagagcccacacaggccccacgaccaaaggcagggacacagcaaacagggacaaacaaacaaccaaggaacaaaagaaagggcagcccgcagcaggacaggggcaacggcagggaacacaccaccagaaaccacggagggccgcggagaaagcgaaagcgacagagggcgggcccgggcacccaccaaccgaggcccccgggcccacgcgggaagcaccgggaccagaagccagagaaggcaacccagggggccacagcaggggaaaagaaagaccagggaccagcccggaccccagaggaggggcgcagcccaacaagacgagccccaacccacccccccgaaggcagcgaaggccacaacaaggaaaacccgaagagccccagccccaacacacacacacacacacacacacacacacacacacacacacacacggagacgagcaacacaagaccaggagcagagcagggagaagcccaaggccaagcaaaagcccgaaaggcaacggagcacccaccaaaccacccaggcagccaggagcagggcacagccaagaagcagaagacagcgacccagacaaacccaacacgcagggcaaggaagcgagccacagagagcgggaccacaaaaaggaccgcaccgacgccccacaaacaaagcccgacaacccccaaacgccccacccccccgaccggcccaacaacaaggccacacgccccaccccggccccaggccccaggccaaccaggcccccgacccacccccagccacagccccaaaaagcaggaaagcaacagcggcaaagccccaaaagggcacccgaccgaaaccggcaccagcaaggaaccccaaacgcagaacgcgggaccggaacaccccaacgaagacaggcccagaggggacagagggaagggacaccaagacaccagccacccgagagagaaggaagagaaacgagaaaaggccggaagaaacaagccagagaaagaggcggaggccagaggaaacagagcacagggccgagaaggcggccagccacagcgggacacgggccccgacgggggcaaagggggagagccaaagaaaaagagagacgcacggccagcccagccacaagcaaagaccccacccaccggccagggaaggaagccgagggggagccccgcgcccccacaccacggaagcagggaaaaagggagcacacgagccgcaagccggagaaggccagccacaacccggagcccaagaaccggccgggagccagcagaggcagggccagacagaccaacacaaagcccagcccagaacggaacaaagaagcggccacgaaaggaaaaaaagggggagggaggcggaagcagcccagacggaaagcagagagccaggggaagccggaggagaccagccagcacacaaagaacccaggacaaccagggcaccagagagaccgccaaaaagcaacaaaaaaaaaccccgagaaaaagcaaaagaaagagacggaagggcaacaaacagaaggacccgcccacggcgaaggcggggcaagccagcagccaccaaacccggagagacacgcacccaaacgcgcaaagagccccaaggagacggaggagggcgccccgggcccccaccaacaagcagaggggcgccagagccaacacgcagaccacaaccaagagaccccggaggggaggagcaacaggacgacagaagcaagacagaggccacggaccaccaacaaccagagaccaggaccaccaacaacaacagagacagggaccaccaagacgagcacaaggagcacggggaacaaggccgggccccgcgcacgcgggggaaccgccaaagaacaaccagacacgggcagcagcagaaagccagcggccaggacagcgagaagacccaggagcccaagccccagggggccaaaggacaaagaccaacagggacaacccgaacaaaacgggccagaagcagaaccacagaagccagagacacacccagaacaagaacgacggagggcgacggcgcggggcgccacggcgagacagccgaacggacccgcaggagcagggccaaggcggcacccggacaagcagagccaaacaccagccgaaaagcgagaaccgagacagagagaaacaagaaggcaacgagccaaaaccagccccaaacacaagaccaccgaaccaaaaaacgacggcggaaacgcaacccaagccggggacagaggccggacgcaagagagaggacacccggcgaaaggcccggagaaggggagggaggagacccagaaaggggaaccaagccaggggcagagaggacagggacagccagagcaaagaccacgacaggacccagggaagacgggcccacccaacacagcggagccaacacgcccccaccccagcccccacccccaccccaccccagcacaggagccggggcaaacgaaaaaagggccgcgcccaggcgaagccaagaaggcccaggaggcgaggcagccgaaacacagacgcagcacaacagccaacacccaggaggaggaaaggagaggacagggggaaggccggaacgaacccccgcgggcccccccgcccaaaccaccgggggggaaggcacgggaagagaccagaaagagccgcaacacacagagccaacaagcagagcgaacccacaccagcgccaacgccccaccagggaccccgggggcgaggcagaccgcccgcgagcacagaaggcgcagcagggcagccgccggcccacacaaaggaaagggggcaaagaagaacaagaggccaagcgggcagagaaaaggcacccaaccagccagccaagacacagagccagcacaacaaaaccccccgggaaggggacagagaacccaggacgggaagccgaaccccagcacccacagaagcggaggaggccagggccggaaacaacgcacggagagccagcacacgcgcgcagggaggcacaggggaggcagggaagagcggagaaagagagagagcgcccccagagcagggggcagaagagggcccagccggccccgagagagggggcgggggggagcgcccaaccccgcaacaacggaggaccggagcccgcaggggccccccgaccagggcagggaggagcccagagagcacccagagcaggagccgggcccaaagcccccacaccaggcaggcgccccggccagcccgagaccccacagcagaggggggcccgcgggacaggggaaggagccgacagccccgccccgccccaccggccggacaggcaccagagcagcggaagggcacccgcaagagaagccagggccggagaagcagagcccaagagcgggaacagggagccggaagcggaggcacccggaggcccgcgaaccccaggcagccggaaggcgccaacaggcacaggggcgccagagaaggcccagcggcggaccccgcgccgacacccgaagcccggccacccacagccaggccagcggcgcccacccgcagcccggagcaaggcagggacagccccccccccgccagggacgcagacagccaacccgcgaccgggcggcagcccgccacagaagagagcaggcccgcagaaagagacagcaggcaccaccgccggcccgggagccagagccccggagaagcccccagcccagcagccccccaagaggagagaggaaggggccacgggaagagggaggaggaggcaagcagccgccccgacacaaggaaaaaagaccaacccccagcacgcacaccagaaaacgcgcagaaggagacgaggccaggcccgccacagaccggcaacagccagaggcgaccacaaaaaggggcgcgcccccacccgcccaccccacccccccccgcccccccccccccccccacggcaggccagcccacccccccccccccccccccccccccccccccccccccccccccaacccccagccaaaaaacaacccgcccgcggcggacccagggggaagggagcccagcagggcccacgaggcaccccccacccaccaacccaccaccaaacaacccggcgcgccccgcgcgcgcgcgcccccccccccccccccccccccccacccccccccccccccccccccccccccccccccccaaaacacaacagagacccgcccacgccacagccacaggcgaagggagaagagccagcagccaaacagcccagaacacgagacaaaaagaaaagaccaaccgcaaacaggggaagcccaccccgcaggcacgccaccgggggggaaccggccgacacagagccggaccgggaagagcgacaaaaaggcacagggacaacagggacaggacaagagcagacccgaggagccccagaaacagccacaccccggaccagcaggccaaagagcggggcaacaaacaaacaaacaaaagggcgagaaaagagggaaccgcccccccccacgcagcccgccccaccaaaccccccagaagccgccaccaagcaaaaacgaaaaagacacccgggcgccaggagggaccgcgggacaggcgaagagaggaggacgaagagaggagagaaacaaacaagcaaacaaacaaacacacagggcaagaaaacaggacccaacagcagacgcgacaccccccgaccgcaggcagaggaccaagaaccgcgcgcgacaccggccaggaaagaggacccacacaagccagccaagaacggccccgcgcccgcaaccgaaccgcggggcgaggggagggggccgggaagagaggagagaccacgacaaggcggaagggagcggcggagagaaggccccggccgaggagagcaagaagccgcaaccgaccgacccacaccccacaccacacccccccgcgcagggccgagcagggacaggcccacaccgcacccgcccgcgccagccccccggccgcaccaggcgaggacgaagcaggggccaacagccagccagagccagggcgggaaggagacggccagcagggcgacagagccaggcccagagaagcacggggcaccccgaggagggcgagggaggggaaggagggggaagagcagaggaaaacccggggccagccccgggaaaccaccacgccccaagcagaggaagaaaagagaacgcccagccacagacgccaccagagaaccgagcgacgaacgaacaaggagccacaaaccagaaccacaggggacacagcccgggcgggcacccccgacccccaacacacacccaaaagccaggaaagggagagccagcccacccagaagcaccaaacgagaagccaggcgaccagccaaacaaaacgggccaggcaaacaagcaggcagagcccccacaacgggcccaaccaaggaagaaaagaaggaaccagagaggaaaggaccggcacaggcggcgcaccacaagcgcgaccagcaagagggaaccgcgaccccgcccgaaagccccgagcaaggacgcagaaagagacaaaaggagggacagccccgagggcccggagcagggaacagagacagacacagcacgcaccgcagaaagcaagcaaagggcaccaaagagaacagacggccacgaacggacgcaaccaagaaacaaaaaaaccaaaggaacaagggaccagagggacccagggaacaccgggacggaaccggaagagggagaagaggcccaggacaagcacacaggaacagcccagaccaggaccccaccccgggcagaccaggaaaggggggacgggaccacaagccggaacaagcagcccaaccacgcaacgcgcgacggaagccgacccagcccgacccgagaccaaggaaagccagccacgcccacacggcccggacccaccaaacaaacaccgccaccagagcagacacaggacgccccaagccgcacaaaccagaacggagaaagcaagaacgggacggggcgggggacacaggacgacgggacgacgcacggcacagccgccgccagcccacccgcccaccgcgaccgaacgcccaacccccggcacagacgccccaagagcagagaaggaaaaaacagacggcgcacagggacaagagacgacaagaccagccgagcgcgggaaaagcaaaggaagaggaaacacccccaaaaccagagcaaaaacaaaacacgaaaaagcaaggcagggagaggccagcccgcaggcgggccacaaacaaacaaaagacaaagccagcgcgggaaggccagcaaccaagccgcagacgaggaagagcggccccagaaccacaaaaaagccaagaagcgggaacacgggcccagaacagcaggagggagacaggagacagacagagcccggagcccagggcggagccaggccggaaagcaggccaagaaagacccaaaggccgaggaccagcacaacgcagccaccaccaggcaccaggcacagccccccacacacaaaaaaacacgaacacaacacagcaggggacaacggcaaggccaccaggggcaccgccaagcaaaggcgaaccaccaaaggcaggcgccgggaaggggcccacaccaacggcacggggggcacaccagacaccacacccgggcccccagcaggcagcgcacagggcagggcggaggaggacaaccgaaagcaggcaaagaggcagccagagacaaagggaagaaagggaagggagaaggcagacaagacacggagacacgcacacacggccaccaccaccaccacacacacacccacaacaccacacacaggggcagagaggagaggcacacagcagggccaggcggagcgagaggaccaacgagagccaccaccagaccagagaagaaccaagcacaaagaagaggaaggccgacgcccagccaccccagcccacagggcagcccaaggcgcggaagaacaagaaccaggcccagccaaaaaaaaagaaaaaaaaaaaagagagaagaaaaccagccccgaggaggggaggaggaccgagcaaggagggggccaacaagaacaagccccccccccccccccccacacacacacacacacacacacacacacacacacacacacacacaggcgggcagggagagggcaaacagaccaacagagaccccagacagaaaagacaaaagggagaaggaggagaaagagagaccagagggaagcggcaaggcacaagcaagaaaggcagagaggagcaacaaggcccggcccagcccggaaagccaaccaacggacagagccagagagaggccgccaaggagcgccgaccagcccaggagcccagagaagaccggaccaagacgcgccgaagagcacagggcaaggagaagggggagggaacccagagacagaacagcccagcgcaggacagagaggcagcgccccccagccacaggaggggggggggagcagggaaggaggcagaggccaagggagccccaggagggcaacacacagccgccccccggaccagcagacgacaacacaggacacccccccccccccccacacacacacaacacacaacacaccgagacagccccagccgccaaaaccgcaaggaagcgcacgagagggcaccgcagccaggggcagaagcagaaaccacggcggaacgggcggggaagagagcagagaaagcagcggcccaggaagggaaagcaagcaacggcgacagccccccgggggcaccaggggaaacagggcccgagcaccccaccccacagaggaacccgggccgcgagcaccgcgggggaaacacaccacagccgaggaaagaacgacccacaccgag

SEQ ID NO: 798 - RNA, 767 nt, Mus musculus
acccagccaggcgacccaaaccagggaccccccagcccccccgccccccccagaaacaagcacgggccccccgcccagagaccgaacacggcgggggaacagacaggaaaaacaaccgggacgggcgaagaagacgacgccagcagcacagcccgggcccgaaagagcgcaccggaagagcgccccccgcgagccccaaagcaggaggagggcagagaggggcgacaggccgccgagaacagcgggagaagcccgccgacgggagcagccgaggggcagcacagggcacgcccaggcccacaacggagggccaaaggaggcaccgaacaggaagggaaaccagaaccaacagggcaggcagggcgagaccagcgaaaaggagcagccaagacccccggacaccggcgcggcagccagcggggcacgcggggcgccccggagaagacacggcagaccaggcccaaagaaacacccgacacagaaacaaagccccccagggcgagaagcaccagagcccaggcggcccagacccccggacaggaagaccaaagacggaccagccgccccaagggcgagcaaagaagccacacgacacccgacaaaggcaagccaccgaagcccagacaggccgcccccgggcggcgggaacccaccagggggaggccacaggccagccgagaagcgcccggcaaagaaaggacgcacggaaacaaagacaaacgagccaggcagggacaaggcggaacacccagggaggggaggaggag

SEQ ID NO: 799 - RNA, 1416 nt, Mus musculus; identical to SEQ ID NO: 692
  misc_feature (494)..(593): n is a, c, g, or u

SEQ ID NO: 800 - RNA, 7797 nt, Mus musculus
acacgccccccccccccggcaaccaaggagccaaacaaaaaccagacagacaaccaccaaccagagaaaaggaacagccagggccccccccggcgaggcagcgcaggccccacagcaggaccaggaagccccgcccaagccggcacaggggacagcaggaagcggcaaggaggaaggcgaagcacgcagaaagacacgcaggaaagcaggccccagcagcgcaagcgagcagcacgaaagaccaaagaggcaaaccaggccccacaggggagggggaggagccgcaggagagaacagaggagaacaggcaaagaggcagaagcagcaaaagcacccagacacacagcagaagagaagagacagagaccccacacacggaacgaaaaagcaccagccaaccacaacccgagccaaggggcacagagacccaaaaaaacagggagagaaaccacagaaacaaacgaggaacgaaaaacaaggggaagaagaaaagggaaaaaaacaaaacagaaccccaacccacaaaacagcacagaaccggacaagagggggaaacaaagggaagagaaaggacaaggcaaggaagagccacacacagaaggaccaacccgaaggcgaaaaaccgaaagggcagcaacccaggaggcagcgcagaggcccaaaagggcggacgcaggaagaagccaagaagaaagggcagggccgggccaaagccggcacgcgaaacgcccaggccaggcgggccaaagagaacggcacagaggaagcccccagcggcaggcgcgggaaaacccgcacgaccaagcaagcagcagggaacacccgaacaaaaaagcaagagacaccagccgcccacggaccacaagcacaaaaacaaagaacaccaggaacacaacaaagccaaaaaaaaagaaacagcaaggcagcaagaacagcaaaggcggaaaaaggaaaaaaagccaagccagcgacaggaccgaaaaccagcagacggaacgaaggacacggccccccggaagccacggggaggagggcaggcgcagaccagcggacagccgggcaccagggagaccgaaccggagcaccccagagacacagaagacacaggacgggaggaaacagccaacaagagcacagaaggaaagccagaaaaccgccaaaacaaacagaaccaaaacagaacaagagcagggggggagagagagagagggagagacgaaaaggccaggagcccaggcgccggaacacagagcccaggcgacaacaacccgcccagacgcagaaacagggcacacacacacacacacacacacacacacacacacacacacggagaaggcacccaagagcggccaaagagaagcaagggaaagaaaggacacagaggcccagagggcaagggaacaaagaagacaagggggaggggaagacagcaagaaagccagaccgccaaccgaaaggagagacgcagccaccgggaaacaaggcccggggaaaaacccccgacgaaaggacaagcacagcaccgacgcgagaccaaggacagaacggaagaacgcagagaagcaaagacacgaaccaaaggaacccaggaggggaggcgagccagggggaagggacaagaagaagcgcagacagcagcaggcgaaaacagggaagggcagccaagcagaccaagagcgagggccgcagccccgcaacagacacacacaaaacgcccggaccgccacacagcccaggcgaagccacacacaggcagcagaggcccaggaaaggcgcgccaccaaaccacccaacaaggcccaacacggcacagcaggaaggggaaaacacaccagaaacgcgacagggaaacggcagccgaaaaaggcaagaccaaacccacagaaaagccgggggaagacccccggcaacaaaacaaaaggaaccagagcacagcaggcagaaccaccacccacccccccccccccccccccccccccaacccccccccacgcccccccccccccccccccgcacgcccccacgggaaaacgacccacaagacgcaggcagggaaccccccccacacaacaccccccccccaggaaacggaggggagcggggaaggcacccggagacaggcaacccaagaggccggccacacaggcagccacacggccaacacgaacagagagaaagggaaccacaagccaaagcacaggcaaaaccacggcaacgcccgggcgaagccaacacaaagcccaaagaccgccacaggaagagccggggcgaaagaccccaacaagaccagccgcccagaagaaagaagcaacagccaagacagaagaaccccacacagaaacaaagacaagaagggcgccaggcccgaaggcaaggacaggagcaggaggacaaggcaccccaagacaggcccgaaagagggcaaagacagccgagccaagaaaccagcacggaaggacagcgagcaaaaaaaggaaagacaggcacccaaagcaagcccacacggagcaaaaaggggccaccgcaacgagaaaggcagcgaagggcagagggaccaccgagacccaaacacggacacagcacgccaaaaaaaagaaaaaagaggccccaggcccacaaacacaagggacagggagcaaaaccaggaagagacagaaggaggaaacagggccccagaacacgaagaaacgaagaaacaaaaaaaacaaagaaagacagacaaagcccccacgccccaaagggacaccccccgcccccagaggcaggagcacagcacagaacagcaacaccaaaaggcggcaggcacagaaagacggaggccagacggaagaacacagcgagggcccgccacgaccaacagacaggaaaccgcgggggcgagagagcacaaagcaacccaacaaacaaaaacaagagcaccgccagacggccccccccgaacacggcccgcggccagccaagacccagaagaccgacacacaaagaccagggcaacaagaccagcggccccggaggaccaaaggggaggggacgagacaaagacgcagagaaaacaaacaaacaaacaacacccccccccccaaaaaaagacaaggggaagcacgagcaaaagaaagaaaaacaaaacaaagcacaaacaaagaaccggaagagacgaggggacgcggcagaaaagcacacaacgaaagagcccagaaggaagggcacaccaaagggcagggaagcagggagagggaaggaccccgaagccccaacccagccccggacccccaaccccacaggagccacagaagaaaaaccagaagcacgccccgcagagaggcccgccgaagaacaccgcaccaaggccccagaggccacagagagcgaggaaacgcccgaaggccccaccacacaacacacaaaggccaaccaggcaaagcccacaagacacagcaggcacaagaccccaccagaggcgacgcggcgagccgacggagccacgacaagacgcccacgcgcgaaggagggccaccacgacccgccggccagcacagaaccccgggagaaaaccggaaccacaggaagaggagagcacacgaagagcagcaaacaggcacccggagcccagcgccacacgagaggacaaacaagcgcgcgccaccccaagcacaccgaggacgggaagggacgcaccccagagacgaagagcggaacaccaccgaaccagacacagcaacaggggggacggaccaggaccaaaccccccccacaaaaaaacaccagagaagcacagagaccaagacccacggagcacacagcagcccagaaaggaggaggggcaccggagacgggggacgcaggaaagcgggggagggaaggcaacaagaccgaaaaacccggcggcaagggaaacaccgcaaggaacggaacagcgggacagcacacagccagaagcccacccacaaagggcgagggcacagacccaaaacagccggcccgccgagcgagaacgggccagcggggaggcagggagacggcaaccccccggaggccgggcaaacccgcgcgagcggacgccgccaagagaccccccagcaaggcaccagaacacagaacaggccggcaacgcaaggagacaaacacccaaggacccacacgaagggccccggcgcaaggccagccagggcgaggaaacaaagacggaccacagcgcagaagcacaaagcggaagccccgccacgccggagcaacagggggccgagagcccgcaagggaagggagaaggcggcagccagcacagcagagggcagagcaggcaggccaacacacgcaacccacccccaccccaggagaggggaccccaaggagacgaggaacagccaggggaaagaccccagaggcagaaggcaaaagaggacgacgcacaaacaagggaaaaccccccgacagcaacacccccgcccccgaggacgagaaagcgggaagcagaaggccacaagaggaagaccaggaagggcggaaccaacacgcgagagccaggcacaagacggaaaggacagaggcaggccccccccaaagcaggcaagaggccaagaagaagccggagacaagccaagaacccaggaacagaacaaagcgagaacaaaaccagggcagagcccaggagagacccgcccaaaacagaaacaccaaagcagagagcgggacacacgaaacacaggccacccggcagccagcgcacagcaaaagcgccacgcagggggcgccccgacagaaaccccccaaacacgcgacacgggcgacacagacaaccccgacacaagccccacgagacagagacccaggaccagaacgggaagagcacgaccggaacagggaacaggaaaggagcggcccgagcacgggccaccccgcacgagcgagaaaggagcaggacgagaaaaaagacagagagaaacagcacccaggagacaaagacaacaaacacccagagccacccagacaaaagcccgcaaacaagggccacggccaacgacaccagagggcgaaaccaccaagccagcgcaaagaagcaccacccaccgacaaagaaggaagaagaagcggggagaagcagggcgaggccagcacagaagacccagaaaaaaacaggcaacaaagagcaagcacaggaggcaggcgaagaagcaacgccggagaggacaaagaagacggaacacaggcccccagcaacaaaccaggcgccggagaagcgagagcagcgcagccacagaagggagcgcagggagcagccaagagcggcgcccaacccgacccaacaaagcgacggggccgggccccacagaggggaggcccgcacgcgggacaggaaagaaacggggccacagcaggacacccccgccaggaggcaagagccggggcaggcggcggagggccagagagaggggacacgcccgggcgcccaccggcagggggccgcggaggcggggaccagggaaaggagaggcacaggcgccgccgagagcagcccaggagaaacgagaagagggcgagagaggcagcgcgaggcaaaaaaggacccggggaggcaggaaggaaaccggggcgaaacaccccccccacacccgcccaaggcagcccgaggccaccccgcagcaggcccaggcccagacccaggcccaggcccaggcccaggcccagccccaagggcgcagcaccggcgacaagccagaacccaggccccagagccccagaggccgcgcaaccggcacacggccacccccaccagcaccagcagaggccacacagcggacaacgagggggcacccgggacaaaaccgacaaaaacacaagcaacgcacgccgcaaacagggcaaacggggcggcgaggcccgcccaaccacggaggacccccccggccaagcaaagcgccgcgaaagaacgcacaaacaccagacacaacgccaccagaaaagcccaccgggccaagaggagaaaaaaagcccgaaagaagaagacaaacagaacaagaggacccagggagagcgcaggcccccacaggagcccagaggagaggcagacagcacgagcaagaagagcaaccccaacacacaaaacggaggaccagaaaacgcaaggacagccacagcacccaagaaaggagccaacgagggagccgaacagaggccgggcaaaccagggaaggggggcgacacaggggcgagcggggcagagcaccaggcaagaggcaaacggaagcagacccggagcaagccagaaagcagcaccccacaacgcccagcacgagccgcccggcccacagcaacagcaggggagccaaaagcgccccacagcggcaaaaggccacagaacagaagggaaacagaggggacaagagaaaaaaaaaaacagacaaagagccagcgccgggccaccggaagggccggaacaacgccaaaccagcaggaaaggggacgcccagcaagagaaaagaagccggaggaaaaaaaaaaaaaaaaaaaaaaaaaaaaaaaaggcaagaaaggagaagaacacaggaagacaacacagggaacccagaaagacaggaagacacaaagacacaaacgacaaaaagaaagcgaacgagaaaacccacccccacacaaagaagcgcgagcacaaagggaaagaacacgcggggcacaagaaaagagcaggagggaccaaacgcgcccaaccaagggggacgcaccgcaaacgcaagggcaaaccgaaacaagaaacaggagacagagcaacgagaacggagggcagaaagggagcagccagaaaaaagccggaaaaagacacccccaagaaaaaagaaacggccacaccacggaaccaccgaaagagcaccggaaaaaggaaaaaccaccaagcggaacaaaaaaaagaccggaaaaaaagcaaaagacgggccaacacgccaggcaagaaacagaacaacccaggagggagacgaagcgcagaacaagaagaaaacaagggcgcgggggggggcacaggccaacccagcacgggagggagaggcaggggaccggagcgaggccagccggcacagagcaagccagaagagcagaacacacaggaaaaccacaaagaacaaaacagaaagagacacacacacacacacacacacacagagagagagagagagagagagagagagagagagagagagagagagagggagagagagagagagagagagagagagagagagagaaggcgacagggcaggcaacaggcgaaacagcagccacacaagggcaccaaagcaccaggggaagcagggagaggccccacaccccacacacaggaacccacacacagggaaggcacccaaagcagagcacgaacccagcgacccaacacccccaaacaggggaagacacccaaaacgcaccaaaggcacacaaggaggccccaagcaggagacagcccgaggaccaggacacgaagcacacagaaagaagggaaaggccagacaccgcaggagggcccccccccgcccgccccacacaggaacagaacagcagcaaacgcgacacaagcagaaacaacaagcaaaagcaagcagaaaccggcccaggcaaaacggaccaagcaagcgagaaaaagagagaggaaaaaaaaaaagaaggaccaagaaagagagcaaaaaacaaaggggaaacaaggacaccgacaaaccagggacagaggccagaagaaacccgggggggaggggcagggggaacaccgaaccaggagaaaacagaggcccaggcaaaacaaacaacgcaaca

SEQ ID NO: 801 - RNA, 1305 nt, Mus musculus
acaggacagaagccagccggccaagcgagcagggcaagaacacagcagcaggacgggagacgagggagaacacgcccaaccaaaaccggagagcgaccggcgcggagcgccagccacgccacaaccacaaaacccaaaagccaagggaggcacagaacaaaagaaaagagaagaaaagggggacaaaaaagaggaaggggaagaaaacagaagggcggaaagcagacacacggccacacaaacgacaggaaaacaaagccacgaagggaaccgagagagagccaggcagaccggaaggccaggggcgaaccaaaagcgaaacaacaacacaagccacgggagccccacaaccagcccagacaagcccaccaaccggaggagaacagaccgaacagagagagaacaaaaaggaagaggcagaggcaacaccaagcagggaccgagcacagggcgggccgccacaccaggaaacaggggcgaccacagggcgggccggggacaggacagagcgaggcacagaaacaacgaccagaaagcacgaagcacacaaaacgccccaagaagaccacagagaggcacaccaaacaggaagaggcagcgggggagaaagcagccccacaccagggcaggagggagccacaccacagacgggccgagaagcgcagaacacggcacacaagcagccccaggcgagccacagacagagacgggggagagagggcacaaacacgcacacccgcgccccaggggccagcccaggccacagagcccaggcagggaggcgcacaggagaccagccccgcggacgaggggggcacacaccagcccacccagcgcagggcagccacacgcccggcgccgagccccgacccccccagcccagcgcgcagacccaccccagccccccccaaccaccaccaaaaggacagccacaaccacacgcgagaaggagaagaagcaaggaggcacaaaagccacggagcccagccaacacccaccacgcgcgcggagcgagagcggggaagagaccacagagagcccacagcacgcccacaccacacccacaccacgccagcacgacccccgggagagccaaccaacgcgcacacgaacgaagcgggccacaacaaagaacccaagaagccccacagagccccgcgccccaacagcccgggaccaggcccaggaaaccacagcaaagacacaaggaagcaaaaaccaaacaacaggggagaaaaaaaagaaccaaacgggacacaccaaagcacggaggcgcgcgggcagaagacccacccggcacgaaga

SEQ ID NO: 802 - RNA, 1809 nt, Mus musculus
cagaagagggaccaacgagagccaggggggagagacaggacagaccaggggccaaaaggaggcaggccacaggcagaccaacccagcccgaagagagccccccccccccccccccgggaccacagccaacggcaaggccacagcgaccaacacagaaaacaaaaagacacaaaaaaagacacaaggaggaacccagaggcaaagaggaaacaaacaaacgaacgaacaaacaaaaaaagagcagaacaaaaccacagccagggagaggaagagaaggagggaaaagagagaccggccaaaaaaacaaaaaggaaaaggaaaagaaaaagaaaggaaggaagaagaacgaaagaaagagaggggaagggagggaaggaggaaggggaaaaggggccaacccgaggaaccacaccccagggacggccgagcacgcacacaacaaacccacacacaaaaaggcagaaacacacacacaacaaccaaaaacccaaccgaaagaagaaggcaaacagggaacagaaaacagaaagggccgggcgaggaggggaccaaggaaagccggagcgcaaggcaagaagagaaccacggaggacggggagacgcgcacacggagggaggcgagaagcacggcacgcaacacagggaggggacacagccaggggcaaaacaaacacaagaccaaaaaccccaaaaggacaccagaagaaagggaaaaacaaagccaggcagggagccgcccaggaccagagggaggccggagggaggccacacggccggggggagcccacgggccggcaccaggagagccggaaaggcaagccgcccacgcccccaaacagccggaaacaaagaagcaaaaaaacagaacaaacacaggcagggggagagccaaaccagcacgggccagggaggcaggagagcagaaacaaaagggccaaaggccagccagggaccgagaccgccaaaagaaagaaaagaaaaacaaaaaaacaagcagagaagcagaaaaggaacaaaagagcaagggacacgaaacaaaaaaaaccacacacaggccaagaggagaccaaaaaaaccgagccacccagcccgacagcaaacaaacacagaagaaaggggcggcgccggagaacagcagccacccagcacgccggcccccccccgccccccgagcgaccaagaacacccagacagcagaccaccggaagacgagcaaggggcaaacaaaagacggcccaaaaccaggaaacaaaagggaacaggggcccccccccaaaaggcggaccagacggccaaccacagagccaaggagacgaaacccgaagcccgcccaccgccccggcgggaagcaggggcaccaccacgccggccggcccggcagcggcggggcacgcggaacaccccccggaccgagacccccggcagacgcccacacggcgcgaagcaaggaaaagcagcaaggggcccggcggggagaacaaaagaaccccacgaaagagggggggggaggggagcagggaggcaagggccaggagccagaagaaagcaagcgggcccgcaccaggggggggacaaacccaggcaccaggcgcacagcaagaccgcaaggcaccacggccaagacagcaaacgaggagagccgggacacgccgcccccccacagaagaccaccgcccagggacaaggggagccccgcacgggcgccaacaagagcgcacccccaaaaagacaaagcgcaggcaaaggacagaccacgggcaaggacggcgacacgcacaccccaacccgcccaacacccccccacagaaa

SEQ ID NO: 803 - RNA, 1407 nt, Mus musculus
gccccgcaccagcaggaggcccacaaagccagacaggcacggcccgggcgggcagaagagcacagaagggcaggaaacaacccacggcagacagaaagcaagggggaggcagagggagcggaacagacaccagaccaaggcagccaaaaagaaaagaggagaacgaacgcaccccacagagagacacaccagacagcagaaagaaagaagaaaaacaaaaaaaaaaaagaagaagaagaagagacacaccagaagagggcacaaacaaaacacaaccagaggcgggaagaacccggccacgagccacccccagcccccaagacaaccgggggggagacagggccgaagcccggcgccggaaccaccgacaccaggcggcccgagagagaaaccagaaaccgccgcccgccccccaggcgggaaaaggcggcgccaccacaccggcccaaggcaaccaagggcaacaaaggagcggcacaggcagaggcagccacacacaagggggagcaggcagcacggacagacaggacaggaaaagcgagagcacaccacgaaggcgcaggagaagacggcccaggcagcaggacaaggcaaaaggccacgcccacaggacacaccacccaacaaggccacaccccaaaggccacccgggccaaccacaccaccccgcccgcaaggcgcaaacacagagcaggggccacaccaacaagcaaaaaaaaaacacccgcaacaagagccgacaagaaaggccaaagcaccaacacaacgaaccccaaagcaagacaggaaaccacgggcaaaccaaaccgcacccaggagcaaagggccagacccaccccacggacgcaacagacgccccgggcggccaccccgagcagccccagcagaagcccaggccgggcaccaaaacgggggcccaaggcaaccagccaagccgccaagcggaacgcacagaccgggcacccagccgccccagagcaccaagccagggaccaccccaggcggcggacaccagggcggcacccaacagcggggccaccgcaacaggccaccaaagccccaaggccccagggccaagcccagccgcagaacccccaccgaccacaacacaacgaggcgcaccaccaaggcccccggcccccacagaccgagcccagcccagacacccagcccaaaaccagaccaccggggaccacacaaccaagccagcgcagcagaggacaaccggccaccggaacacagccccccaaaaggagcgcggcaaagaaaaggaaaaccgacccaccagcgcggcagccaaaaacagaacaccgggcaagaagccaggccaaccgaggccacacgcggcccagcaaaagccacgaggaggaccccagagccaacaggcaagaccacagacccaaagcg

SEQ ID NO: 804 - RNA, 2688 nt, Mus musculus
cgaacagggaaagcccagcccccccccgggccacgaagcgaacaaagccagagggcaggggccgcggacccgaggaggaacgacgccgggggaccggggcccccccgagagccaggcaacgagcgacccccaaaggagggcgagaaccgcaacccagggcaaaaagccacccaggacaccaaggggccaggggggcaaaggagccaaaaggggggccaccaacgaccgaccccccccaccacaaaacggagacaaccgcaaaaaaagcaggcggccagagaaacagcacgccagcgggaaggcggcccccggggaacacaaacaaacaaccaggcaacagaaccacagacaggagcagaagcagaaccacgaagggacccaaggaaagaaagacccccaaagggagaccccaccaagcgggaaggcgagcacccagcgagacacgagacggacgcgaaccacacgaggaagaggaaagcgagacggaacgagagccaggccagcagcggggcgagaccacacaccaccaggcaggggagaggagcgacccccgaccgaaacccaaggcaaaaggcaaaaaccacaaaaaagggggaaggaggggaggaaaaggggaaggccaaaaccaaaaaccaacagaggcaggcacaaagcaacacaccggggcggagagaaacaggcccgaaaaagaagagcaaagaaaaaaggcccagcagggagagagaagggggaaaccaggagacaaaaacaaccaaaccacccgccccccccacgaacaagcacccgagcggccaagaacccgacacccgaagacaacaaaaaacaacaccagggcgcacagagcccccgaggaaaaaagcagcccccacgcagcacaccgacagggaagaaagaccaaggaagacgcaagcccagacagaccaagcgacgaaccaaaacggggggcgaacaaggcagcggaccgaccacccggccgcaccagccaaaagacgcaaggaagggagggcccccagcggacccgggacaaacacacaaaggagcacacaggaaggagcaggaacaaggaaccagaagcagaaacggaaccaaaaaacagaagagacacacaaggagaccgggcaagcccaacggcagggggggggggacgacagaacgaccacccgcaggcgacggcgggcgaacagagggccgcgcagaggacccggccaaacaaagccacccgagagcgccagagcaaccgccccccaagggcagagaggggcgaagaaaaacccacgagcaaccccaaaaaggggggcagaggcaagcacagccagcaagaccgagaaggggacagacgagaggaccaggaagccccgaaggcaaaaggcgacggacgggggcagggagggggaacccgaccaaggaaggagggagccggcggaagcgaggagacccagggaggaggccgggaagcagaacgaaggccaacagaacagggaggccacgggggcgggggcacgaggccaaacgaaccagacgagacccaggcccacaagcaaaaaaacaaccccaccgcagccccaccagccgagcaaccggcgaaagacagaccgcaaacacggggcgacagcagcccaacagccaacggggcccaggcccgagcgaaaagagaaccagcccgcaggaacagaccacagcccaccaacaccacgggaagaacacaaccaggccacaaaaaggaggcgacccccgcaaaggaccacgcggccgggcagcagagaaccaagccacagaagggggaggccagcagcggaaacggaggcagaaggcaggcggccaccagcccggcggcgcgggaggggaaacaagaccgaccgaacaggaccgagaacgccaagagagcagaggcgggggggggcaggcccaggggacccggacccaagggaagcaagaggagcagggcgccaccaccaggccacggcggggccgacggggaggcaggaccaagcagcgacccgcacacgccggggggggcaacagcaccagaacggccccaccggggccaagcggccaggcgagcgcgaccaagacgagcccaaccggaacccggaggcacgcaggcccggaggaggcccgacgggcagacggaacaacccagggccagggagcaaaaagagcagaggggaggagagcaggccaagaccaaacccaccgaccagaagggaggcggcccccaaagagaaccaaaggggaagaccgaaagccaggaggcggacccgaggagcgcaaagggaaggagagcacccagccccgccggcccagacaaagaagggccaaagccaccaccaccgccgagccggggccaaagcacacagaaacccaaagccccaaggggccaaccgacaccgggcaacaaagcgggcccagcgagccgaaccagggacccgaaccgaggcaggaccaagaaccggaccacgagcagccggacgcccccccccgcgaacagcggacgccaccgagcagcggcaaggaacacagaagcaacagcagcgccccaaggaagggggggggggcggagggcgggaaacacagccagcagccgcgccgcgcacccggagcgcgcaaagagaccccgccagaggccgagcacgcccaggaggcgggcgggccgggggcggagccggcgcagagcggggggaagggcgg

SEQ ID NO: 805 - RNA, 14619 nt, Mus musculus
agggagggagggagggcagggagggagggggggcagggagggaagagaggagagggaggagagggagaggagaggaggggaggggagaagaggagggagggagagcaagaaggcggagcgccccacagcagaaggggccaggcaacacaaagccccacaaaccacacagagagcaccagccaggcagcaggcgggcagcacagccacccaggagcacgcccgcagaccccggcagcaaaaaagcacgcaacgcaaacccaacacccgcgagaaagacagaacagcccacggagcccagagagcccgaaagagcccacgggccaggaggaaaagagggcccggaacccgggagcacgggagcaggagggaagggggcaggcgggccccgcggccggcagacacagagacacaccacgaagggggcagccaaacccagggacaaagagaaaaggacaggagcagagaaagggccaagaaaaacaggacacaacgcaacaggggaagccacaagacagcgagagaaaagccacacgaagaaccacacaacaaacacaagaggaagacagaagagaaaggcgcaagagacaaaccgaagacaaacacagcacgcagaaaggagaaggccagacgcccagccaagaggaaaacgacaaaaaaacaaaaggggggcggccgcgggggcacacaggcaacgcgggccacagagcagaagagggaaggggaccccggaggggggcagcagcgagcgacgacacaagacgggcgaacgaaccaaaagccaaccccagacacccagcccccaccgacagacagcagagcgcaggaggccaggagaccccccccccccccccccccccccccccccccccccccccccccccccccccccccccccccccccccccccccccccccccaggcaaagaaggcaggcccaaagccaggcagccgcagcacagagcggggaaagcgaacccaccacccacccaaaggcaagaccagcaccaccgcccagcagacaacaaaacacgaaagaaaccagcagcccaggccccgagcccccaaagaggaggcccccaggaaaggcaagaggacaaggcacacaacgccaaggacagaacaaacaggcagcgaaaacaaacacgcaaaacgaaaccagagcaacaacacggacacagcaaaacgaggagacacagacaaaccagccaaggcagaggcagcggaagaggggagccacggccaggacaaacagaggaaaaaaagggggggggaacaaaagcaaaggaccagagcaaaaaacggagggcaaaaagaaaacaaaaaccaaggaaaagaaggccaggagggaaaagaaaggagagagaaagaacgggaacgagagccacccaccccaggaagccccacgcgagccaggcgcaaaaaacaagaagcagagggccggcaaacaaacaaggccagaccggaaaaggacaacaacagagagggggaaacgacaaaaagggcagaaggcaagacggccacacagacagcaggagggaggcgagcccaaagacccgaccccaaccgccccggcaggcccacgaagcagcggccaacgggggccgaagaaagagaaagcgcagagagagaaagcagaagccaaggaaaggggagaaacacccgggacccaggagagaaaagagcaccccagcccgagaggcagaggcaggaaaaccagagcgaggcacccaaacagagacgaaaagagaacagaaggcaccgaagccggaggaaccgggccacgagccagagggccacaggcggcagaggaaagacaggaggaaaaaaggaaaaagagagggagagagagagagggacagaggcagagaggaggagaggacaaggagaagaggaacacaaaaccaggcacgcacgggacaaccagcaaaaaaaggaggagaaaggcacaagagacagagaaaacacaccaaaacacacacaaggacaacacaggaagacgacaaggacgcacagccgccgacaagggagagaagacgggaaacaaaggaagcacacaacacagggagcagagcagggagacggacggagaaacacgccaagcaacagaggcaaaggaacacaacaagggaagaaacggaagcagcacacaacaagacggcagacagggagagaacgacaaaacaggaaaacccccaagcacgcaacaagcagggcaccgcaaaagaacggcacacagaaagcaccaggcggacgaaggcgaaaggcaaaacccacccacgggaggggagcccaggggccgagcacgcacgcaaccaaaagggaaaccccagcagacagaaagccacaggcaaaaagaggaaagaaaagacaaaaggaggggaggaacaaggggggcaagaggaagaagagaagaaaagaaacaggccccaaacaaaggcagagaagcaagaaagacaagggaagaaagcaaacacaccaacccaggccacacacaaagccaggggaccaagaagggcggggggcgccgggggagaagaaggagggacgagaaaaaaacgaacagagacaaaagaaaccaaggccagaagggacggggcggggggggcacaaaaaccgagaaagcaaggccagagggagcggcaacgcgcaaacaggacacaaacccacaacggcagcgcagggcaccaagaccgcagccacccaggcccaccgccccccgcccccagaggacgcacaggaaaaaagccagggaacacagaccgaacaccaccggagccaacagacaggagcagcagcaagacgcgaacaagccgcaggacaccagccaccacaccaaccagccgagggcaaaacagacagcagagaaaggagagaaaggacaaaaacaaaaacgccgaaacaccagggagaaaaccgaggggcgaaccccaaaagagagaaggaaaaaaacagaggccccgaacgagcggaagcacggcagggaaagagaggcaccggccccaccaccgaaggcacagagcaaagggaaccacaggggaggcaggcaggaggagggagaacagacaaccacaccaaacagaaaaacccgccccaaagaccacacggcccaaaccaaaacaccaccaccaccacaaaaaaaaaaaaaaaaaaagggaggagaagaaaaagaggaggaggaggaaaaggaggaggaagaggaggaggagggagaagaggaggaggaagaggaggaggaggaggagggagaggaggaggaggaggaggaagaggagagagaagcaaaaagaaaacacaagcggccggaggaaaaaaagagaaacaaaacagggaaacagaaaacaagaaacacagagaaagaaaggcagaaaaaaggcggggcccaaaccccagcaggcagccagacaccgaaccaaaagcccgaagaaaggcaccgggccgcgagcgaagagcaacacacagaaggacacgaaagcccacggccacacgacgagacaccccccgagaggacaaggaaaaacaagaaaacgaacaaagaagcccagcaaccaaagcaaggacaacgagaccgccacacagccggccacaggcagacagcaaggacaaagccacagagagaccaacaacacccgcccacacggaccagaccacagccaaacaaagagaagaccagccggaaagagagacagaagaacaacaacaaacaccaagccaaagcacaggcagcacagcaaggagacaaagcacgaagaagccgggacaaaagccgaccacggaaaaacagacacacacgcagcccagggacaccccagggcaagccacccacgaaacaaaagaacacggcgggcgacaagagcccccgaccaacggagccacaacaggagcagcgagcccgccaacgcgacaccccaggaaggacagaaaggcaaggagcgcaccgggcccagccaccaccggccaacgcagcaaccaccgaagcagagcccgggccaggaggacacagcaaaagcaggaagacagaagggaggagcaggcccagaacaccacgggagaaggacccgacagcgcaaggcacccacaccaccccaaacccacccacccgcaagaagccaaaaagcaggggcccagggcgaagacggggaccagcacgccaagggaccggaaaggggcgcaagcagcccgccaaagaaaggggggcacaaggcagccagcaaaacgggcacaacagaaaccgaccaagaaggccgcccgggggggcacgcacgacacaacggccaaacacggagcaggaccaaaacacaggcacacccaaaacgggcaaagcacagcgccaccagaggaccaggcagcccagcgcccacacaaggcgccaacagccgaacccagcgcaggggccgggccccaggccccaggacgcaccaggcgggccgacacaggcagagagaaaaggcaagcggacacccacaagccagcagacgccagcagcacacaaccgccaacccgaaaagaccaacaggaacaggggaaacagccgggcaaagagaccgaaaggaccccagaaaagcgggacgcgacaagcagcggaggccgcccaagaaagaggacgagagaacaccacaaaagcggaccagagacaaagggagacccgagggagggagaaaacaagcaaagaggacaaagaacgaagaaagggggggacgggcaggcccagacaccagaagggggcaagaagacgcaagcggagggagcagacaagcacccagagaggcggggacaaacaaggcccgaaaaaggggaaaaccaccaggagccagccaacccacaaaaaagcagaaagggacagcgagaacagcccaagccacacccgcaccccaaccacaggggacccagacggcgcacacgcacacccacgaaccacccaccagaggagcgcaagggccaccgaccagagggcagacagcacacaacaagcccccagcacaaaggccgcacgcagcccggccacaagccgccaccgcccccccccgcgcccccccccccccccagcgcccaccccaagaccccaccagcgcccaacgcaacaaggcagccagaccagaaaagaggaaaagacaccgaggaaagacaacgccgggggggcagccccccgaggaagcagaaaaacagaacaaacagcacagggcaacccacaacagcccccgccaaaaaaaggccccgaaaaagagcacagccaaacaaagcagcaacaaagagaaaccaacaacaaccacaagcaaaggaaagacacaacaaccaaccgacgagacaacggccgaggcaggaacacccacgaaacaaccaccaacagacacccaacgcaaacaacaagggaagagacaaacagccaacccacagagacgagaagagaaaaaacccggaagaggaacacaaagacacaccccaaaacaaccagagagaaagcgacgccggacggacacaaccggacgggaacacgcgccggcccagaaccacgacacaccaacgaaacaggaaagaaggacagcacccgagacagagcagcaacgaccaccaaagggccggacagagcgcaggggcaagggcaaccccgagcaccgccacaacaaagcaaccgcggaagggccagcggagaaaagcagcaggcagacgcccaacagacacaagcaagaaaaagcggagggcagggcggaaaagcaacaggccacaagcaacagaacaagaaccaaaagccgcggggcacacaggcggcaccacccacgaggaggaggaaggagagagaaagagggagagaaaggcagaagaggaaaaacaagagcacacacaaaagaaaacacaagcgacaaaaacacacccccccccccaaacccgccccaaacaagacccaccaggaaacaaagcacaacaaaaagaggaaaccagccggaaggaagcaagccaacacaaagggccagaacacagcggaggagaaccacaagcaccacgcccaaaacagcaaacaaccacaaaacagccagacccacagacagggagcccaccccacaagaaaacccggcaacgaacaccgaacacaaaagcccaacaagggggaacgaccaaaagaacaagaaaggcgaagagaagaaaccaggagggggaagggaaacggggacacaaggcagacccagagccgaaaccagggcccagaaggcaggaccagaaggaggaaccagaaggaggacccagaaggcaggaccagaaggcgggacccagaaggcaggaccagaacgcacgcgcacaacgaaccacagcaagcagaagaccaaggcaaacaaagcaggcgagcggggaaacgcggcaaacacaacgccaagcacagccgggaggccagcaccccagaacacgaacaacccagaaaaaccacaggagcacaggagccgggccccaagacaccaagccaggaaaagaaacagccagccggagccaaaaccaaaccagaaaggagaccagaaagcagaacgaaagaacacagcgaaagaaacaaaacacacgcagagaccacacacgagcagaaaaaaaagaagacaggggggggggaaaggaaagagcaggcacaaagaaagccagggagagcaaaagaggaaaacgggaggggcagcggcccgccccaggcacaggacaccgcaccagccaaagaaagaaggacaccaagccggcccacaagagccaaggaccgccagggcaagacgggcaaagaggccaaaaaaaagcgacaaacgcagccagcgagcagccgaaacgcgaccacgcacgacaaaaagacaaacaacccaaccaagcaacaacagcgagaggaaaggaaagccagcaaagaccgagcacagcgcaccacagcggaaggcccgggccgaaacaaagcacagaaggccccagggaaacagcacagaagagaaggcaaaacagagcccagagaaacagaggaagcaggagaccgccagcagcagaagaaaccgagagccaaaaacacaaaagggggagcccaggaacacccggaaccccaagaagaagagcggagagaagacaagcggaggcacaaaaggaaaccacacaagaaaagagaccaaaaagaccgaaagggggcagcaaagcccgcagacagcacggccgccccagaggacgccaaccagcccggcccacaggaccaacaaagagagccaagaacccagccagagggcgacacccccggccccagggcacgcaccacagagcacaacacacacacacacacacacacacacacacacacacacaccaaaaaaaaagcaaaccaaagaccgaaagaaagagaaagaagaaagaaagccagaaacacagccgacagaaaaacacacaagaaacaaggacaaaaaagcagggccagaaggcccgcagacgcaacccagaggacagaaggaacggggcgaggcaggcacgcacagggcaggacaggagcccgagggaacaacggcaggggaggccccgcagagacgacgaggcgcacaggaggcaggaaaagcgggccaacccgaaaagcagagaagagcggcacacacagggggagaccaaaacgacacaacaacagaggggaggcaaagcaccacccacaaaaagaaaaggacagccagaggccaaacggcacaaagagagggagcaacaaaaagccaccagaggccagaacacgaagggaaaaagccaaaaaacaaaacaaaacaaaacaaaacaaaacgaagcaggacaacgaaccagaaccacgacaagcaaacaggacccaagccaaaagcaacgcgcaagggaaccaaagggcaggcggggcagggaggcagggggggggggcggggcacggggggaggcgggcagggggaggaaaaacaaaggggcgcgcaggagaagaaaaagagacgaaaacaccagaaccccaaagaacacaaacaaacggcagggaaagcaaaaacgaaagcagacagaaagaacaaaccagaggagagagaaaacaggccggccaacgggggcggccgccccccaccccccacaaacacggggaagaccggggaaacacaccgggcggggccggcgcaggcggcaaccaggccgacgcgaaggaaaaggggaacagaagcaaaacagcaaaaaaaaaccacacacgccaaaccgccccagcaacgggcagcgccacagccacacaccgacaaaaagccacgggaagaagcagaacagcaccagggcaaaaacaagacggaacaaaccaagaaagcagaagcaacaaacacaacacacacccaccaaaaaggaccacagggaaaaaaaaaacaacacaggagaaggaacgccacaggaaaccaagcaacccaccagggccaccgggagaaaaaccgaacagcccaccccaccaccaccccacccgaccacagccaggaccaaggccaccccacccaaccacagccagggaccaaggccacccccaccgaccacagccaggaccaaggccaccccacccgaccacagccagggaccaaggccacccccaccgaccacagccagggaccaaggccacccaccgaccacagccagggaccaaggccaccccacccaaccaagccacggacaaggccccccacccgaccaagccagggaccaaggccaccccacccagcacagagcccgccagagcacaacacaagccgaacagaacgagccaggacacggaaacccagaacgcacccaaccaaaaaaacaaaacaccccaagagggggacacggagcacggcaaaaggaagagaagcacccggaaacaaaaacagggacggcacacaggagcagggagggggggacgccgaagggggcacaggcagagaaggcgacaagcccgcgacacaagagaagaagggaaccccaagacccccaggagagaacccagagccccggagaccccaccgcccgaagacaagggccaccagccgccagcaaaggcggggacgaacccagaccaacacgcaaggcaagacacaagaagccaccccgccccaaaacaccaagcggaaaacaaaggacaggacccgccggcgcagcgggcgacaaagggaccgagcaggcggaacaacgaggacgaagaagccgccccccgccccgaccaagacacgacaaagaaaagaaagcaggcgggggcccggccgggacacccagaaccagagcggaagcagacagggcccaaccaggcgaacaagcaaaaagacacaaagagacaggacacaaagcccaggcgccgaaccggccaagagacccaaccggccccgggcgaccaaggacccaggcaacgaacgacagcgcacggagaaggcagaagccacgggccaaaagcagcaaagcacagaacagcaccaaagccggaacaaacacaaaacacacggacggccccacaaaagagcaccaccaccacaggcggaaaacaaaccaacaggcggagggaagccagggaaggggcaaaagagacagagcggacgcagacaaccgcgcacccgcaaagggcgaaccccagaccaacagacagccccgaacgggggcccaaaaaacaaaaccaaacagggaaaaacaacaaaccgagacaggaacaaacaacgaccacaacaaacaacagagcggacaagcaccgccggcaacagaaacacacagccagcagcggcaaccaaggggcacgacaggcaaaccacaaaaaaaaagaaaaacaggaaagaaggcgagcaaggagcacccgggacacaaaggaaagcgacaaaggggccaaccaggggcagagacacaacaaagaagaccccccccccaacacaaacagagagaagaaggcaagaagcaacaacaaggaagcagcgaaaggaccgcacacaccccacagcaagcaaggcggacgagacagcagacgcaacaacacacaccgcaggccagcacgcgccggggaggacccagcaccgagcacagggccgaagagccccacacgcaaagagcagagccagacccacagaggcagaagggccccccacccgaaagcacaaacagaccacccggcgccagggagaagacaaaagaccgcaggcagccgacccgcggccgaccccccggagggaccggcgccaggcaccacgccgacgccacccacccccacgcggaagcccacagcccggccgagcgacacgacgggcgggcgcgcacagccagagagagggaaaaaaccaccagcgacgaccccggagaacaaccaggggcgcgcagggagcgaaggcaggggaacaggccggccacgcacgagcagaagcccaaccaggagcgcccagccccaccaccagccccaccaaaacacaagagggccacaggggggagacagggccgaagcccggcgccggagccacgagaccaggcggcccgaaccagaaacgccgcccgcccccgaggcgggaaaaggcggcgccaccacgcccagcgccacaaacggggcgcgggagagacggacccggagcccggaggccagcccacggacgaggcggccgaacccgagcgccagcaacaccccagccaggggcagagagcaacgcagggcccggacggaaaaaagaagcacaggacaaaacccacgacgaaaggcaaggacagaacccgcaacacaacaaaacaacaacaggagaaggacagcaacagcgcccgcgggaacaaccgagaaaaagacacaacacccccacaacaaaaggcagaaacgcaaaggcacaaacagccaccacgcgaaggccaaccaagaaagacagcacgacgaagcacagcgacagaccggaacggagcggaaccaaaggccaaaccgaaaagacgagagccccaaaaaccaacacacagcgccggaagaacgcccagggcagagaacaacagcagaggaaggccaccaggccccaaggcaggcccaaccggccccccaggagccccgccccaccgacaaacgcaaggaaaggagaggccacgcccagcggcacgcccagcgcaaccaaaccgaggcaggaaagggacaagaaaaaggacccccaccgaagggaagccgaacacacagagggccgacgccagcacgcgggggaaagcaaggccggcggacggcaccggcacgcacgggcgccacagaacccccacgaggagccgagacacagggagagcaagaacccaacacgggccggacgcccaaagcaagccgcaccccgcaggaacacagaaccggccgcaaggaaaccccgcaggaagaacccacagcccacgccgccaaggaagacaggcaaagaaaaacccgacacgcgcggccaagaggcacgcgacaggaaccgggggcgccccgggaagccgccagcaccgaacaagcagagggggcggccaaccacagacgagccggagaccccgggggggagcggcagaaggaccgagggagcagaggggagcaaccccagaggaagaacaagcaacggcggaccacccaggcccagggacagaccacaccaaggaggacagggagggaccaggcccagacaagagcagaggaggccgcgacacaagggaggggaagcccgggccgggagggagccccagcagaggaagcggagaagggggcaagaacggggggggagggagcaccccaagaggcaaaggggaggggggagagggggagggagggggcggggaggggaaccaggaagggaggaaggagagaaacgaaggaagaaaaaaacaaaaaaaaaagaaaaccagaaaagcacccaccgcaaacgaaacaaaccccacgaacgagaaaaacagcgagaacaaacaggaagcgcacacacagcacaaacaaaagaagaaagcaaagggagcggcgaggggacggggcagggggcagacagacgccagagagcacagcaggagacacagcaaaggacccaaagcgccgcgccaagacaagacaccaggagccgggggccgcaagcacagcagccaaacggcccgaagaggcaccaggggcgacgagccaagacaagggacgagacacgagaaggaaaaaacccaacagcggagaagcagcgaagaaccaaagaacggcaggccgcaagcagaagaaacaaacacaggaaaacaggagcgaaacaaaaccaaacaaaaaaacacacaaaaaaagaaaggggcggagagaagcggggcaaaggcagcgccgcaaaggacaaagccagcacccagaaggcggcccacaaccaccaggaacccgcccagggagacgggccccgcggcccagggcaagcacacacaaaacgagacagcaaagccaacacagaaaaaacaagaacaaaacacaccacacacaagacaaaagcaaaaaaaaccaaaaacaaaggagaaaaagaggaacaaaaccaagaaagagacaccgccaaaaacgaaaaccagcaggaaaaaaagcgaagagggcgcggggcgggcaggcggagaaaggaacaaggcacccacagggaccaggcgcaaaaacaaaaagaaacacggagaaaacaaccaaaccacggaaacaccaaaaaacaccaaaaaacaaccagcacgaagagcaaaccaaaccccacaccaaccagaaaacgaagaaaaaaagcacgcaacagaccaagccagacaaaggaaacaagacggacaggaggcccgagacaccgagcaggcccagagaacccccagaccgcccacagcaagagcccccccccccccgcagcggggcaggagggcccgcaagaaaggaagacagagggagggggaaccccagagaagcaccgggagggagcagcccggaacccaggcagaaaggacacagggccaggcacccccacagggccgcccaaaacccgcccgcgaccacaagaggcaggcaaaagggcaaaacaggccaagcaggcaggcaagccaccgacccaagaacaccggaccaaaaacacaaacaagcacaagagcacgcccagagcccacaaacgcgccagaaaaggaaaaagggccagcaaaagcgggggacagaaacaacccggaaaaacggcaggaaacaaaggggacagacccaggaccgaagcgcaacaacaacaaaaaagagcaacaaaagcaaaacggcaaggaaaaaaaaagcccgaacccaaaaaggaccagaagcaagagaacgggggaccacagcaagggagaaaaccccccgacacagcaaaacaaaggcagcacaccagaaaaaagagggcaccacaagacggcaagacccaaaaaccaaagaaaaagaacgagccaacagccagcggagagcaaagagcaacgacccaaaggcggaaacgaaaagacccgccagccaggaccgagacaggaggggaccagccagcgcagcgggggaaaaagagaccaaacacgcacggccaagaaaagagaagcagaccggaagaggagcgcaaaggcaaaaaaaaaaaacagaaaagcagaaaagaaacaaacaaaaaaaaggagcaagaagaggcaacgccaaaagccccagaacaagagaaaaggcacgcacagagggacaccgcccccagcacagcaacgcaggaaacagcagaggcggcgcaaaggcagaccagcagaccgcccagaaaaaaaaggaagccagacccagagcccccggaaccacaaaacaaagaggaacgaacaagagggaacacagacacacagacacacaccacagacacacacacacaccacagacacaccacaaacacacacacaccaggcacacagcacacacacaacacacacagaccacaccacacaccacacaaccacacacacacacaccgcggacaccacagcgccaccacgcaggagcagcaccccagggaccaaccaaggcaaaccaacccgccgccgccccacaaccccgggaggggagggagaggaggagggaaggggaggcacaagagcagggaaaacggggacaacccagcaccaccgaggaacagccccccacgagggagagcaccacggccggacccacccaaggcggacagacaagccagggcccaggcggggcccccaagccgaggacacaaggaagccaccacaccccacacgaggcggggacgcccaaaccacacaccgaaaaggcaagcacgaccacgaccgcccccagcccccaaacacgagccagaaagacggcacccaggagacaacaagaaaagaccacgcccagcaggagaccaagaacccaacacagaagcagggcccccggcaggggagccaggcgaagcgccagcagagcccacggcagacaaggcagcgagggccaccccagagagcaagaaaacagggcccggaggcaccaagaccacacgaagaaccggacccggggagaagccagaagaagcgaaaaagacacaaccacccgcaaaacggagagaaagacagcagaagccaaagcagagacgccaacgcagcagccaaaaaaaaaccgaaaaaaggcccaagcccccccccccaacgcacgccagcaagaaagaacacagccgaacaaacagagagaaagcaaaccccaaaagaagcaaaagccagcggcag

SEQ ID NO: 806 - RNA, 842 nt, Mus musculus
cccagagcagccccagccacaaccagcccacagcacacacaggccaccccccgggaccaaggccggcccccaggcgccccgaaaacaaaaagggcggaaagcgcccagacccacccgggaagagaccagacagcaaacaaaaaagccaaagccaaacaagagcaagagggagacagaacacaaaagagaaccaaaaaagaaaaaaaaaacagagagaggcgaggcaaaccaaccccagaccaagcacgcgagccaaggcagccgcaagaagaccagcacacaagggcggagcgaggccagggaagagcacgcaccccacaggaccgggcaacccagcacccacaggagccacaagcgaacccagccaagggaccacaccaggacaacaaaacaaaacaggaggagacacaaggaaacaagcagggaggggcacaacagaagaggcaggaagacacaagcaagaccagaccaacaacaaaaacccaaacaaaaagcaagcaggacaaggcgcaaacaggaccccagggaggccagaggaaggaaggagccggaacaaaaagaccaggaaccaggagcgagcggcgggaccaagcagaagaggagggaaggcgaaccagaccgcaagcaagccgcccggcacccagcaagcccccaggccgggcggcccgcagagaggcgaacgccaagcgaggaaagacagacgaggcaaagaccgcggcgccaggaagaaaaagaggggcaagaaggaagagacaaggccaggcagcgacacggccagccaaccagggggcaggaggaaggaccccaggccccaccaacaaaggggagcccccaggcaccac

SEQ ID NO: 807 - RNA, 1534 nt, Mus musculus
caccacagaggaccgcggggccccagcacccacagaaggcacaacgcaaacagccacagaccagcgcccccggccccaggaaccagcagccagacacaccgggcacaggcacaaagaaaaaaaaaaaaaaaaaaaaaaccgccgcggggacgccaacccagcacagaagcagaggcacgaggaccggagcgaggagaagcaacacagaggaggccaagccagccaagaccaaggaaacccaggaggaagaagaggagaaggaggaggagaaagaggaagaagggaaagagagagagaaagagagagaaagaaggaaggaaggaaagaaggaaagagagagagagagaaagaaaagaaaagaaaagagagagagaaagaaagaaagaaagaaagaaagaaagaaagaaaggaaggaaggaagaaagagggagaacgacaccggaggcacaaggcaaacaaaggaagagaacagaagaacaagcaaacaagaaacgccaacccagcacccaggaggcagaggcagaggaccccaaaccaaggccagcgacacagaaaaagccaggacagcagggcgcaaaagaccacccaaaaagcaaagcaaaacaaaaaaccccccaaaacaacaagaagagaagcaaaaaaaacaaaaaaaaaacgcgaccagggagcacagaccacggaaaggacgaccccagccaccacaaaaccaggaaacgagacgcagcccaaacagaggggagggaggcacagaagcgggacgccaagaacccccaaagcaagggccaaggaagaagagacaggaggggcacccaaagccgcaacgcgacgagaaacagggccgacccagccaggcggaccgacacgcgggggcacggcacccccccccccccccccccccccccccccccccgggacgcagcacgagcaggaagggaccagaggcaaaggaacggaaggaacacagcgaagcaaaaaaaccgaagggcgaagagacagccccgcgagagcacgcccccgcagaggaccagccggccccagcccgcaaccaccgccacccagccaggggaccacgcccccacccagagccccaggcggcaccgggcccgacacacagaaagcaggcaaaacaccacacccaaaaaaaaaacaaaacaaaaaggggaaagggaccaaaccaaaaaaaaaagaaagagaggacaagcaccaaccccacaaaccacaaaaacgcaaagggccaagacaaacaaagagcgaaaaaaaaaaaaaagaaaagaaagggggggccggggggggagccaacccaggacgggggcaaagaaccgagcccagaacgaggcagccggcacagagcaagaccaggacagccaggacacacagagaaacccggacggcggagggcaacgacacaagcggaacacagagaaaggaaccagaggaaagccccagagaccagcgaaggcaccagaggacaaggggggagggcccaggggggggccacccgggcggggcggcaaagcagcaagccaagcaagcc

SEQ ID NO: 808 - RNA, 1719 nt, Mus musculus
ggggggaagggggacggaagcaggaaagaaagagcaaaaccaaaaaaaaggaaaaaaaaaaaaaaaaaaaaaaaaaaaaaaaaaagaaaagagaaagaacaccaggagagaaaggaggcacaagggccaggaaacaaggaaacacagaacaaagaagcgaagcgaaaagaacaagcgaaacacgagacagaggcaaaaacaaaaacaaaggcccaaaagggaaggaacacaacggaggcaccggggaacgaacacggaagaacaaaccagaagggagggcaaacggaccaaaaaggcagaagaaggcgaccggaggacagaagacgaagcaagggacagaaaacaggcccaagcaaagagacacaccaagccagagacgagaaagcagaccgagcaaggggccgaaaaaaacaagccaagacaggcaggggacacaacacggccacaccacggaggccaaaaggacaaggaagaaggaagacaacaagcacaacgccagaacaagagaaccaggagaccagcaaacaacaagcccggggacgagcaacgcagacggaccccacaagcggccagggagagacacagacaaggaacagaaaccaaaaagagacaccagagcggaccagagaacccaagacacaccaggccagaggcgaaccgaaaacggaaaaaaacaaaccaaggaaaacgagagacagaaggacggaagagaaagaggaaacgcgccgaaaagcagagggaacgacaacacagcgcccgaaagaaaaccacgaaaaacaaacaaacaaacaacagggcaaccccaaggaagaacaacaaacaaccaaccagacacccccaggagccagggacaaacaccaaccaaagagacacaggaggaacccagacccagcccaagagcagagaaggccacaggcacacgggaggagaggcccggccaggaaggccaagccccaggaggagaagagaggaggggaggggaggggggggggggggaccaccccaagaagaaggaggaggggaaaagggggggagggggccggaaaaaggaaacagaaagaaaaaaaacaaaaaaaaaaaaacagacaagaaacaaacaaagggaagcacagcccagcagagaggccaaagaaaaggaggaccgcacggaggcgggagcccgaaaaagacagagaccaacaccacacagggcaaaagacccagagacaaaaaagggggggggaccgaggacaaagagccgggccgcggccccggaccccgggaccagggagcacaaacacaagaaaccagaagccggcaagagagaccaaagggagagaaccgaggaacaagaaggggaagggacccaaacaagaaaaaggagaaaaaaaaaacaacaagaaagggaaacaaagcaaaaggaagcaaagcggcaggcggcgagagagcaaacacaccgggaaaggcggagccacacaacgcaaggcgcaccagcgcccacccacaaaacaacacacgaggccaagccaggcaacagagcgcaagcaagaaacgcggcgcccggagaaaccaagggaaagaaagaaaacgcacaacacaaaagggaccaggcaaagcaaacaaaaacccaaggccagagggacagaaaaacccgagggaagaaaaccagccaaaagaagccaaaaagaggaagagagcaggccagcagcaggcgaccaaaaccaccaaccagcgagaaaa

SEQ ID NO: 809 - RNA, 1416 nt, Mus musculus
acggcccacaaggagaaagcacccaacagaaagggaccggaacaacccaaaaacacagagacagggccaccagaaacccggcagccgaaccacagagacgccgcaagcaagaccaccagcggagcggagcaagcaaaaaaggagacaaggcccacacagcgccagacgaaccacagagagccaccccgccccgaggcggaaagagcagcgcaccaaaaaaaaaaaggaacacggaaagagccaagaaccagaacacggcaagaaaagggaaggcaagggacgaacaagacgacacaaagcaaccaaacaaccccccccccccgccccaaccacacacacgcacccccaagccacaaagaccacgaccgacgggcagagcaggcccagcgcaggcccaccaccgcaggcccaaccgcaacacccacaggggccccggaacgcggaccagaacagcgccgaccagacagcgaccagggagaggggaggcccgcgggcgacgacaagaaacacacacaagccgagcagcgccacacagcacaggaccagccccccgccacagacagaaaaaaaaggcccaaaggcccgacacaaggcgacaggaagaaggccccggcagcacccagacagaaacccggcaaagaacggagaacaaggccgcggagacacggggcgaggggacggccaagggaaagccaggcaccacaggagacgggagacccagcacaccaaaacgggggaggagcaggcagggggaggagcaggcaggggcgccaaaccagcaccaggaggggagacaggaggagagcaagcgacaccaaacagcagaacggcaaaggccaggcaagagggacaccacccgagcgaggaggacaagaggcacaccaaacacgccccgaccacacggcaaccaaccacaacagcaagcaaacacaaaccagcacacacagaaaacacagcacagacccacaagaacccaacgcacacacacagagcccggaaagcagcgaagggaacaagaaagccacacgcaggacaacgaacacagagccacccagaaacaaggaaacaaaacaagggaagggagaaagacacggccggcggcccacgcccgggccccaccgacagacccacgcccagacggaagacggacagggagagccacacccaccccacacacccagagaaagcacaccacgcccaagaagcccccaggcaggacaaaccgagagagcaaaggagacacagggaggaccccacaggagcaccggaaccacaggccacaaaaccacacagagaaacccggcaaccaaacagggacaagcaggacgaagccaaaagcgggcagcaaagacaaagaacgaaaaaaaaacaacgaagaaagaaacagccaaaaagacaagaaaaacaagacagcac

SEQ ID NO: 810 - RNA, 4304 nt, Mus musculus
cgaacaaagagcccaagcacaaacacagggcaccaacaggccaccccacaagggaaacaggacaagccaagcgcaaaaccaagaacaaacggcccaagggaagaaaaagagaacaaacgagggaaaagaacaaaaagcgcaagccgaacacacaacccagagccaaccccaggcaagcagagcggcaaccgcagggaaggaagaaggcggacccgaacccaccacgggacaacacccccagggcccccggggcccgaagaacagcggcaaaaggacccccagaaggcagacagggccacggagaagaaggaaaaggaaacccagcgccggcgaggcacggccccaggagggggaacccggcaaccgcccgggggacccaagagaccaccccaagaggaaccaaggggccgccacccagaagcacagggggcggcggggagcggggggcaggagacaaccaccgaaagcccggaccaaacgaaggcaggagagacagcaacaccaggagggcccagggagcaggcagaaaggagaaaccggggcgaacgggaaaggaggaagggaggggagagagggcaacaggcagagacacaaccggaccacggccccgaggaggaaggacggacgggaggcaggagaagccaaccacacagcagagagcaagaccaagccggaaaaacaggggaaagaacccaggcagggcgcagaagagacagacccccagcaaacccgaccaggcgaaggcagcaggcagggcggagcacccgggagagacgggaggaaggacggcagagaacacagaaggagcgcggccgacgggagccccacagcgaccccgggacacgaccgagccccgggacaggcaaccggccccaaaaggcccgcgcaagggagagggaccagacgcaggaggaaaaagaccagcagggagagaagccaaggagaaagagaacacaggaaccagaaaaagaacagagcccgaggagagagaagggagagaccccgagaacaagggaagggacgccggagaaacgggggcacaccagacaagaggcaagagagccagagagggacaggggcccaaaaccaaaccaggacacaccccccaacaagagcaacacccaaccccaaaacagcaccaaccgagagccaaccaaagcgagccagcaagccaccaaacccacagggcaaggcacccacagcgagcgagcccagaacaacaagggcaggaggcccgcagacaaaaagccaggaagcacgggaaagagagaaaaaaggcgagggagaaaagggaaagaggcgcagggagccgagcagaagagaggcaaggaccaacgaaaggaggccagaagaagagagccgggagagaagggaagaaagccgaggcagaggaaaaacgagccagcagaaacgcacaaaggggcggagcggagccagagggaggcagcaggggagagcagagagaaaaagaggggcagggccaagcggaaacaggggggggccaagcagggggcgcaggggcaagaagagagagagaacagaagcaaaggcaggaaaagcaccggaaagacacgagggcaaaaaaagagggaaaagcccggagagggcagcaagaggcaaaggcacaaggcgggagaaaaagagggaggaaccagaaaaggagacaggcagccaagcaggcagcgacggggagcgaagcgacgaggaggaagaaggccagccgaccacacaccagacaagagccgccaccacaggggcaggcgcagaaggggagaccaccagcccgggccccagggcgaggagaagggcagccaagagccaagccccgggccacgcgggcagggaagagcgggggagagcccaaggcccgaccgcaccacgccagcacgagcgaggaaacagggccacggcgagagagcccaagggaagagagggaggaaaagaaagagagggaagcacaggaaccaagaaaagcccaagaaaccccggaccgccgcaaacgcagcggacagaaagaaggagaaggccacccagagcagcggcgagcgaggagagcaccgaacccgggggccaaccaagacccagcagaaagggaggagggggcaggggcaaaacacagccagccaaaaaggggggagggaggaggggaggaggggggggggggggcagggaaagggaaaaagaaagaaaacagaaagaccaacaaaaaacacagccagcaaacggcgacaaagaagacccacccccacacccaggacccaggaccaccaagcgggccaacccggccccgccccaggacggggagggcaggcaggaccacaccgagaggaaggacaagagggccagcagcaggcccagaggccccagggcgggaagaagcccggccccaaccaggacaagagggaacacgcgggcacccaccaaaaaggcacacagcccacaaggaagccaggggacaggaggcacagcccagcacacaggccaccggcaaggacagagccaggcccaggagcccgcacgagccagagaccaagccacagcagaacacggagacacgagcggcagaggggggagggcaaagccagggcccagggaaaggggaacaacgaggcaagccggggcacgagaagaggggcagcccccagccacgggagggcagcccgacagaaaaaagcaggcagagcaagccaagagagcaagccgaaagcagcacccccagggccgccagccgccccaggccgcgagcccgcccgcccccccgaggaccaaagcgaagagaggacgccccgccgcgggcacacggcaacagaaagcaaacagggcggagagaaggggagacgagaaaaccacgggaggcacacccacagcgagcaaggagcggcacagacgggcacgggacagaggaacaaccaggaaaaaacaaaaccacccggaaagaggcgggggcaaaacggaacaggagaaggcccggagaacgcagaaacagaacacgaaagcagagacccaaagcaaagaggcccaacgagagggcaaaaagaggagggaccacggacagacacagagccagcccaagaggccagaagagggcacagcccagaggcaggagccaagaggaggggcgggaaccaaaccccagccccaaagagcgcaaagcaaccacgacccacagccagccaaacggaccccggaacagccagaagagaagccaggccaagccgccgacgcgcccaggccaccgccggccaccaagacccgggaagacccacgacagacccacaaagacccggaagaccgacgacagacccacaaagacccaggaagacccacgacagacccacaaagacccaggaagacccacgacagacccacaaagaccccgggaagacccacgaagaccgaccgcagccgaccacaaggagaaagaggccagcagagccgaaccccccaaaggcaccacggaagcgaacacagcgccacacccacgaccagaacagcccggagcagaccccagcgcaagggagacgggaaagagggggaacaccaagaagccagaccagaaaaagaaaaaaaaaacacaaaaaaaaaaaacccccggcagggggaggcccaggagaggaccaaggaagcgagaggcagagcccggcgggagaacagggagagccaccgaaaggcaagagccaaagccagccgaagagcagagggccacaagcacccggcccagaaaagaccgacagaaagaaaaggaacagagggggcaacagcagcggcacaagagaccccaaggacagcgaggagaccacaggcgacaagggcgaggcaaagaacgggaagaacacaagacacccccggccagagcgagccggcccagacggcccaggcgacgggagccaaaggagccacagaccaaccaaacccgggacaaggagagcaccagcaaacaccagaggacgacccgaacgggacacggacccaggggagggagcacagcccaagcagaagaaagaaaagccagcccgagacaggaaggaaacgagcaaaagggcccagccagcgggggcccagcccccaccccgccgccccacgaggacaccccagacgccccccccaagcgacaacgaagggccccagcccagagcgccagacgaaagggaccccccgccccccccgcgccccccccccggaggaagaaggaagggagagaacacagcgacaggggccccagccccgcccgcgccccacacacccaagaccacagaacacacccgcacggaggcgcgggccccccccagcgggcccgcccgaca

SEQ ID NO: 811 - RNA, 12834 nt, Mus musculus
ggcccacagacacaaagcgagcccaggcaaccgcccacacgccaagaagcaggccacaacacaaccccccccccaaaaagggggggggggggggggggagagagagacccagagagagagcaaaaaaaaaaaggaccagcagacgagaaccaggccgccgaacacaaacaacgggaggcaagaaaacaacaagcgagagagagagagagagaaggcagggccgacagccagggccccaacgcaacgcgaagaacaggggacaccaccgggccagaagaccaagagaccgggccgcagcacaaaaggaaaaaacacacagaaaggacacgggagaagaaaaaaaaagccaaaaaaggaggggagggcacaccaaccagcaccaggggggacaggaggaccgggcacggcacagccagcccagggagagcagcagcaggaccggcgagagaacgcccaaaagaacccgagaggccagacagccagggagagaggcgcagagaacgagagcccagcacccaaggaggggccaacacccaacccaacccggggcgcaaccccagccgccagggaagacaaaccacacacaggcacacaaaaacacaaaaaaagaaaaacaagagacaaaagagagagagaagaaaagaggagccaaaaggaggcagaggcaggcaggccagggggcaaggccagccgagcacaaacaggaacagggcacaagaggccgccaaaaagaaaaaaaagaaaaggaggagcacggcagcaggaacagcaccccacacaacacagcgcacaagagcaagacacagagcacaacaaaacaaaccaccacgaggacaccgccgaaagagaagcaaggagaggaagaaaaaaaaaacgacagcaggccgaaggggcccagccggaccaaggaccgaccacgcccggcaaacaagcggaggagagggccgcagagcaagaccaccaagagacgaaccggggacagcccgcaagaccggccaaagacaaacgagacaggcaggaagaccagccagacacacagcgcacagccacacagccagcaagcggaaggcaacaccagagcacacagagacacagccaaggaccagaaggcagagagaaacaaggccacaaggccacccggcgccggaacgcggacccagaccgaccagaaccgagagaccacccacccgccccaaaggcgggggagagccagagcagcaccaagccggccaagagaccgcaaacggcggagccaggcggccagacgacaggaaggaccgaagccggccccggcccgaaagcacaacacagggcacgacagcggagagagaccgcggaaaagaaagggcccaggagccccaagggaaaagagccaaagagaccagaacccaacacccaagggacaaaaggaggcaacaagccggccgccccaaagcgcgaccgacacaacaacgaacaagaaggccgagcccggcgcggaaccaccgagaccaggcggcgcaaacgagaaaccacgcccgccccgagggcgggagaagggggcaccaagcagccccagaacacagaaagaaacaaaaaaagccaggcagggcacacacaacggcacgcaggggcaggggcaggggcaggagcagggggaggggcagggcaggcagaccgaggggggcaacaggcaccaaagaagagacgcacaaaggcacaacacacacacacacacacacacacacaccaacacacacacacacacacacacacacacacacacgagggagaccgcaggccaggcgaggaacgaaggggccaggcaaaaacacccacccaaagaaggagaaaggcagagagcaaccagagggcgaaacgaacccccaacgcgaaccacccagccccaagaaaaggggggccgggggaaggagggggggggggcagagggcccggaggccagggccccagcccggagagcagagggggagccaccgagggaagcggaagagaaaaggaccaagcggacggggacagacacacgaacccgacaccagaagggaggcaggcggcagaggaggccaggggcacaaagaaacccagacaaaaaaaaaaaaaagcacaagaaagagcagagccaaacaggacaaaccacaacacgaggacgagccaggcggggccggcgaacaccaggggcgaggcagaaggacccggaggggccagccgggcacagaggagccgcgccaagggggagaacgagaggcaaaagagaaccacacgaagaccgccccaccacacgagggcagcagcaggggggaccacgcagaaccccgaggggaaaccacaccccgcgcagcaaggacccccaaacagagggcaggcagcgagaagaaccccagcaggccgcccggcacccgacacagggagacagccgcagaggaaagaacgggggggaagccagcggcagaaaccgccggcgagcccgggaacaaccccagcacccaggaaggagaaagaaaggggcaagaggaagggcgacacgaaccagcgcgggaagcgaagcaggaggagcgcaggagcagcagccgggaaaggaaccaggcagccgggcacaggagagaccacaaaaagaaagaaaaggaacaaggaaccccacaaaccgaccaaaccaaggggggggggggggagacagggccggagcccggcgccggaaccaccgagaccagccgaaccagaaaccgccgcccgcccccaaagcgggaaaaggcggcgccaccacgcccggaaaccaaggagcgaacccagcggccggacccacagaagccccgaggagggggcaagaggaacagcaggggaccacaccaaagaccaggaccagccccgacccaacccaaacacccagagcgacccccaaccaaacgggaaccaaacgaagcgcagaggaacgcagaaaaggggagacgggaccaaggagggacccaacaggaagaccccgaaccagcccaccccaccccagaacgccgcgcccaagaacgaccaccaggggaggagccccccagagccacagagaaccagaccagggcggacagccacaacaggccggcacccaggagcagaagcggggaccccaccaggacacagccgcccccccgcagcacgcccggcgaggcgaaggggagccccaccgcagagaagcacgaggcccacccaaaccaaaagggagggccgcagggcgggggggcacccaacccagcacgggaggcagaggcaggcggacgagcgaggcggccggcacagaggagccaggacagccaggggacacagagaaacccgcggagggggcggggggagggagggcaacaacacccaggcgcccaaaaagcccagggaggccaacccaggacaaaggcgcaggccgagcaacaaagcagaccggccccagcccccgcaccagccccgccgcacagggcccccggcggcaacccacccacacccgaacccacagccagggggcgggcaggaccgcccgacccggacccggcgccacacggcccccaccccccccccccccccccccacacaaaggcggaccccagaggcgcccggcggcccaacacaccacaaaaaccccggagaccaggaggcagccaggggaaacacacacaccaccaaaccgggaccagccccacaaaggacacgaaaagcgacgcaaaccgaaccgaagcagaaaggggggggggggggggggggccaacaacacggggggagcccgggaggcagaagaggccaggggcccggaacggagacacagaggaaccaccgcgggagcgggaaccaaaccgggcccgccagagcaacgaaagacaaaccccaagccccccagccgccccaaaccgcggagagcgcagggggaagaggaggaaggacaaagagccagccagagaaaaaaagaggagcaggaacgacccagggcccgcccaagccgagagaccccaccggaagacagagagagacagagagagacaaagacacagagacagacagaaagacagacagagagagagagagagagagagagagagagagagaaccacccaggccgccagcacacagccagagcaggaagaaccaagaggaaacagagagacccaacaaagacaaaaacccaaaaaggcccccggaggagccgcgccgcccagcccagccagggagccaggaagcgcaggcgggcggcgggcggccggccccagccgccccgggaccagccccgcccccacgggccaggaacaacagcaggcccccccgcccgacggcgcgccagcgcacagccgaccacagggcaaaaccaacaggaccagagacagggcccaccacccacccgggccggagcccggcgccggaaccgagaccaggcgccccgaaccacagagacgccgcccgccccagagccgagagaaaggacggggccaccacacggcgccccgcacccacggcgggagccaggagaccacccccagccggacacgaaagaggaagcaacccaccacccagagacagaggcaagggaccggaggagccgcaagagaaccagaacagacagggcacacagagaaacccgccagaaaacaaaaagaaaggaaagggagagagagggggaagagaaacaacaaaaaaacaaaaaaagaaaaaaaaaacagagaacaaacaagagggcaaaaagcagccaggcggggggcgcagccaacccagcacagggaggcagaggcaggcaaacgagcgaggccaccggcacaaaggagccaggaagccagggcaacagagaaacgcgcgaaaaaccaaaagaaaaaaaaagcagggggaggcgagaagaagacagcgggcaaagaaaaaaaaagaccagcaacaaaagaaaaacaaaggacagaaagagaaaaacgaacagggccgcccgggcggggacaaaggggacacgacaaggcaagcaccacaccccagcccagcaaacagcgacaggcacaacacacacaagaaaggcccagaagcccggcgaccgaagcaccgagaccaagcggcccagaccacagagacaacccacccgcccccagcgggacagaggaagcaccaccaagacaaccaagaaaaggggcggggggggagcggccacaacaagcaggacagcacagcggcagaaccagaaagaggccagaagaggggggggaccaccagaaagaggaagagggccgcagccccaagggcgggaacgaaccggaccccgagaacagccaggcagccacgagggcccccagccccccgccccgccccaagcacgaggccaggcggacggggaaacccaaagccgccccacgcagacgggggacaaggggaccgccacacccagaccccccccggaggcagggcccgccaggcagccgaacccacccagccggagagaccgaacgcgaccccgaccaccccaaaggcggagcggagcagaggacaagggcgccccacgccggcccaaccccgggacgaaaccaaacacgcgggagagcaagggggcaacgcaaagagagaaacaaaaaaaggaaacgcagccccgaaaaaggagaggagaagaggcgacccagagagagagaggaaaaccaggaggagggggcggccccgggaaccagagaaaaggcacgaggaagcacccagaggcagggcgagcaggaagggggcggcgggagggggggggggaggggggcaagacagggccgaacggcggccagaacagccccaaccaggcggccgaacccagagagccgccgcccgcccccaaggcacgagcgccacagccggcagggggagacggggggggggggggggggggggggagggggcacacaccggggccggaaccacggagagacccggcggccgaacccccagagacgaaacggacggaaggggacacggggcccgagcccagggccaaagcaagcaagggggagccccgggcccggcccgccaccgcaaagcgggccagagacacaccagcaggccagagggaagaaaaaccagcagaggacaagaaaaaagaagagccgccagggaaagccacagcccagcgcgaacgcgcagagagcgagccggggcaccaccagaccaccgggaaggcgaggcgggagcaagaccagccgggaacccagaacaccaccacacacacaacacacacacacacacacacacacaccaccacacaaagcagagcaggacaaaacccaggcaggagaggaaaaggggcaaggccaccgacacaagaaacaaggccagccgaagacagaaacccgccaaaaaacaaaaagggggcggagagaggccagcgggaagagcacgacgcccgaaggccgagcaaacccagcaaccacaggggcacaaccacgcaagagacgggcccccaaggcgaaaacagcacaggacacgaaaaaaaaacaaaaaacaaaaaaagaaaaaaaaaaacaaaaaggaaaaaaaacaaaagggccagagagggcgcgggacaggcgcggcagcagggggaccgaggaggcccaggcggaaagcagcaggcagacggcaggcgagaccccagaacagaggcagaggaagagcggggggcagccagcaccagccaaagcgggagccaggcaggagaaaccgcacaagggaaaaagcgggaacagaggaagaaagacaccagcccccggcccacgccacgagcaggagcaaaacggcacacccgacgcacgcacacagcaacaaagcaaaacccccacaacaaccgcacagacacaccaaaaaaaaaaaaaagccaggcagggggcgcagccaacaacaccaggaggcagaggcaggcggaccggagcgaggcagccggcacagagcagccaggacgggcagaacggacagagaaagccgaccaaaacaaaacaacccccaaaaccaaaaaaagaaaaaaaaaagaagacaaaacaaaaacacacaaaaacaaaacaagcaaaagagagagaggaggaaagaaaagggggggggcagcagagacaggaccacgagcagaagaggcccagcagcaaccagcaggcagcagaggaccacacggggggaacagaaccccgcccccccagacaggggcccgagacaaggccaggggcccccacgccgcggcgccacacgagccagggcacgaagagaagcagcagagagcacaaccacaggaccaaacggacgcccgcggcccacgccgaacccacagacagcaggacgccggaccagggccccagcgagcggagcccccgaaccggccagcccacggccaacaggcacacccacacacagggaagcaggggcggacccccagaaacggaagaagaagccacaggaagggcacaaagggcagagcaaagaagcagcgagagagagacacaaaggcgaggccgagcaagcccgaccacccggcccgagcaacaaaggaagaaggcccggggggggccggaagggcaagagccaaccaaaacaagacaggggaggaggggccggcccaccgccggcggccggggcgacagagacccccgaccccgacaccggggcccccccacccccccaaagggagcgcgcgccgcgaccccacacccacaggacagcacaccccaggggcagccccggcccaggaccagaggaaccagaggaccagaggaaccagagagaaaggcccacacggacgagcacccagcccgcggacaagagacgacaagcgggcggccaggggccgcggaagagaacgcggagccggggggggccaccgaaacccacggggaaaggcccaacgcccagaccagacaggcaaagcaccccccccacaggacagcgccggcccccccacaaaaaggaagagaagcccggagagagaaggcgcgcagcccaggcagccgagccacaacccgcaaaagccccaagaaagaggccaggcagggacccgcccagcacccggaagcagacaaaagaacccaaaggccccacacaggcgcagacccaaagcagaacgcgggaaaaacccaacaggaaagcacaaaaacaaacccaccccaggcgcagcaaaggcggaacgaaacacaagggaacgacgggccaaaggagagagacaaggaccgagagcccgacgaccgaaaacccagagaccaggcggccccaaccacaaaaccaccggccccccgagaggacgggcaagagcaacaggcccgggaaaggcacggacagggacagagcgaaccaggacgggaggagagacaggaagacagaggaggccagcagagcaaggccacgccaaaaacaaaaaagagcgagcgggcaaacagacccggagccacaaggagcaggagaggcgcaggcaacccaccgggcacacagagaccgaccaaccgagggcacagccgcccggcacccaccacggggggcgggcacccagaaaggacggagcagggggccacagaggcacggaacgaccccgcgagagccagaccgagaaaggggccgccggcaggagcccccaagagcacggcgagaacggggccgaagagaaccggccaaggcgaagcccacccagggcaggccgggggccacgggccacgcaccccccccacacagcagggaaaaggcgaaggaacaccaaagcaccgcagagacacaagcggcccaaaggccagggaacccagaggggggagaggggagaagggaggcgacagaagcagagcgggcagaaaggcaggcagggcacaaggccccagcagagccggagggaagaaaaccaaggcggagagagaaggggcaaagacagcgcccccccccccccccccccccccccccccccccccgcccccccccccccccccccccccccccccccccccccccccccccccccccccccccccccccccccccccccccccccggcccccaccaacaagcagacggggcgaagagggaggcgggaccgagccgagaaggggaggagaacaaaggaggcaggcgcaccaaaggcaaaggccaaggagccggagagcacaggagagaggggcggagccaaagagccaacacacagccgaggagaaggaagccgagcagcaagggaaggaccggaccagagcaggaagcagggcgacaggacggcgcaaagagagcaacgggacgggagaaggaggaagacgacgggaaagagcgaggccaccagcagacccagaaggggacacaaaaccaaagagaggggcagggaccccaagacaggagcacagcacggggacaccagggggggggacccggggagggggaggggaggaggaggcggggcggagaaaacgaaagcagaccaagaaaacagagcaacccgaggggcgaggagggaagaggggcggccacggaagccaggaaggaagagccaggaaagaggggaggaggcaaaacagggaggcgcgggggggggggggggggggggggggggaaagagagcaggccgcacccagcacaggaggagaggcaggaggacagaagcagggcacccagcacaaagcaaagccaaccgggccggagaccacccagggagagggggggcgaaagaagcgcgccaaggcgcggggcccggcaagccagcaaggcagcgcacgcaggagaggagagcgacccacacgagggaccagagcccgaggccgggcgcccaggcccccgcacgccagccccgcagaagggaaacagaaagaggggaggcaggccgccacaaagcgaggccaagacagcaagggcacacaggcaaaccgcaaaaacaagcaaaaaaacaaaaaacgcggccaaccccacaccagcgaccgacccagggccagcacagagccgcgggacaaggggacccaggccgcgcgggccagaagcacccggaagggacgccacccaggcaggaagagccgagcgaggagacacaccccagccagacgcccaccaccaccaccgaccacaaaaaaaaaccaacgagagaggggggggcacacaggcaggcagggagacacagaggacagcgggggcagcccgccagggccccagcaagggcagggccaccacaccaaaccacgcacccgaagaaaccacgagggaagaagaggagaggggaagggggcggggcaggacaggaagagagagaagaacccgggcaggaccagaccaggggcaggcgagcaagagccaccgccaagccacacggcagccccgcggggaagaacgcaaaagaagcagggggggggggggcggggggggggcggccagacccggggcacgacccccgacaaaggaaacacaccagaaagaggaacagacccccaggcacacgaagaagaaaggcaagggagagcagaccccagcaggccaacaggagcaacaccgcaacccacgggaaaggaccaccacacagccagaacgaaacacgagcgccggcccgggggagggaggggcagggaacagaggcacagcagcccagacgggaccagaggagggaacaccgcccagcgccagaacggagcgggcggcaggcggcggaagcccagcaaccccgagcagcaacacagaaaaacagagggaccccggcacccaggggccggaaccgggcgagaccaacccccgacccggccaccccaggcgggaccggggccccagccgccgcgcaaaccaaacgagacagggcggaccggcgccggaaccaccgagcccaggcggcccaaaccagaaagccgcccgcccccaaggcgggaaaaggcggcgccaccagcccggcccaaaccacggccacggaaggaccgacagcagggccggggccgcccgccaggaaagacagagcgacaggaggagcaggagggcgacgaacgggaggccagggccaccaggggaaacacaagccaggcaagcaccagaccagcacccagcccccgcacaaaagagagcccagcgcgcacaaaaaccaaaaacacagagggagcaccgcaagcccagcgccggaggcagaagcaggcagaaccggagcagaggccagccgccagaaacaggcccagagccagagccaagcagagaaacccaccgccaggagaaaacaaaacaaaaacggaaaaaagcaccacaccaaaaaccacacccaaagggacaccagcaccgagagaaggcccgaagcgggagcgcacggcaccagacaaagaagcagaaccaccaccaaaagaaaaaccagaacgaaaaaaaccccccggcccggggcacacaccgacccagcacccggaaggcagaggcaggggcacagagcagggcagccggcacagagaccacgaccggacagccaaggaacagagaaacccccaaaaaaaacaaaaaacaaaaacaaaaggaaacaggaagaagaaaggaaaaggcaacccgaaacgggcccgaccaacacaaagaaaaaaaaggaagccaacaaagagccaggaaaagagcgccacaagcgaagcggaccggagcggaggaccgagcaaccccagaagcgggggcggggaggacgacgcccccaagcgccgagcacaccgagcagcacacacagaccccccccaccccccccccccccccccccccgccccgcccccacacacacacacacacacacacacacacacagcggcaggggcacgggaggaagagacaggaggagggcaccgggaggaggcagccggcacgaagacccacaacacagagagggaggagcccgccgggcgaggcacagaaaacaggaaggggccaaaaacgagaaggagcgagaagaaaaaacacacccccggaggaggcgcagaggcaggagaaaaaaaaacagagacggggccaggcagccggcggccgaaacgcggagaccagaccgaccacgaaccacagagaccacgcccccaagacggaagaagagcaagaaccaccagcccccccaaaaaacaaagaccggaggggggacagagacagcaaggagggaaggcaaaggagacacaccgagggcccacccaccaagagacagggagaaccgggcaaggcggcgcgagccacccacggccacgaccagccggaagccccaggcacaggcacggaggcgaacacgcaaaacaaaaggaaaacagaaacccacaaaaacacgaaaagggaacaagagacgcaaccagaaaaaagaccgcagggggaacaccgagcaccacgaggccccacaagcagccaggcagccccaccccacagaaaagcaaacgaggacagagaggaaaagggaacgagggggacaagaacggcgaacgcgccgaccaccgcagcccgaaagccggaagcaggaccagcaagaccccagaagagagagaagaggcaggggagcgaaaggcccaggaggcaaaggccacggacaagaagcagaagggcacgggcggcgacaaaagaccgaaagcaggccggacgggagaaagagggcacgagagaaacgaggccgggcacccgccccggaccgggagcagggaagagggggcagaaagagaccaacggggcccaacccaacggaaaaaaccccagaaaccccgccacaggaaggcagagccagagacccacacaaagaacagagccagggagaggccaggggaagggcacgcccccaagccagaggaccgagcgagcccgggaccgcaaagggaagaccaaaggccgcacccaccagaacaggagggggcagcccaaagaaaacaaaaaaaacaaaaaaaagaaaaaaaacgcacggaagaaaaggaaagcaggcggggagcgcccccgagcacggcc

SEQ ID NO: 812 - RNA, 1461 nt, Mus musculus
gcagcccggggcggaggccgcggcccgcgggccggcccccaccgccccaccgcccgccacgcgggcggggcccggcagcccagggcccacgcagggaacaagcggaagcggacgaggccgacaccaggccggaaaaggaaagacaaacgaaagcccggggagggggagacaggcaaccgccagacggggggggcggggggaacggagacccaggggaagaggcaaaaggcacgggaaaagggaccccagcgccccacaacaccggggacccagaggcccaccaagcggagagggaaggggagaagcccaggcagggacgacacaaccaacccaccagacagaaggggaggagggggaggagaaaaaaaaaaagcaccaaagccaagggggggcaggcaacccaggaggcaaaggcaaggcgaccgagagacaacggacaggagaccaagacagagggcacaaggagagccgccaaaacaaaacaacaacaaacgggcggcgacaccaaacgggaggaccagaagacagcccaggaagggccgcccccacccggcaccggacacaccagccacagggcaacgcgcccggaacaagggcccggcgcgggcagcagaggacgccccgcccgcgcacagagaacggccaagcacccgcccccaggccagcccgagccggccaacccgggaggggcaccacacgcagccccggacccccccacccacccccacccccggagcccccaggaccacgcagacgcccccacagcagcagggccccaggacccagcccaccccccgcacacagcgggcggaggacacgcccgggcagcagagccaggagaagcaaggaagacacagaaaagagacaggacagagcacagggggccccaaaacacagagccggagcccgacccaaagaccccaaccccacccaccaggcggggacacacgcacagcgaacaccccccacagaacaacacggggagaaggccccccggcccagcccccagcccaacaaaaaagcgcccccccccccacaccgacaccccaacacggagcgaggcaggggggccggggcgggaagcaagaagacaaaaggcgcgagcccggcggccgccccgcacccacgccacaccgggccacaagcgccagcccggcgaggacgaagagcaccagacgggcaagggcgcggggaagcaagaggaagggagagagcggggggagggggaacggggcgccgcccagccccggggggaggccagaggcaccggggggcaggggccccaaccacccaacaacagaagggccacagagcccggccagcagaacaagagccccggcccgcccccaagggcccacaacgagacagcgccaagcggagcagcgacagccgccggccagaagccgcacccacccccagaagagaggaagcaccggcccaggggagcgggacaaccgggcc

SEQ ID NO: 813 - RNA, 6402 nt, Mus musculus
  misc_feature (1131)..(2468): n is a, c, g, or u
ccgaaacaggagacagagcccgcggccccgaaagcacgccggcgaccaccccggcagccacgagacccgcgaccgggccacaggaagggcgcccagcagccacgcccgcccaaacgagagccgggccccgcacccagaagacccggaaggaagccaccaccagaagcgccagggaggcgcgcgccggcagagcgcccagcccagaacgccacaccaaccaagcacaggaagacacaccacccgacacacacaacgccccccacccaccaccccagagcacaacccccccccccaggacagcaacacgggaaacgcaaaaaaccagcccacgccgcccagggaccacccgcaccagcaccacgccacacggcaagcacccaggaggcaagccccgcccaaagcaccccgccaccccaccggggggggggggggggagggggggaccacaaggagaagaagcagcacaccgagcgaaaccccaccacacaccgaggccgggaaccggccggcacagccgcgggagcacgagggaacgggaacgggagacggcggcaccaccagcccccccccgaacaaaaccaggaaggaggagggcaaaccgcccagacacggcgagagaccaggcaaaagaccacgcaaaccggccggggaagaggcgcacaaccacaaagggaaagaagaaaacacaaaaaggaaggcaccgagcaagcggggcacaggccagcagcgcacggccagccagcacgcgccacggcccggaggaagacacaaacaccgccaagcccaagaccgccccggagacaaggaggaaaaacccgaccaccgcgaccgccgagaccgagccagaggggaggccagaaacacaggaacaggagagagacaaaggcggaaaccagccaaggaaagaagaagccagcaaggaaagcgcaaccggaggaggcagcgaaaaccaacaaccagccagggagaaccagggggggagagggagagcgggggcccaaacaaaaacaaacaacaaaagacacaaaagacaacaagacaacaaaacaaagaacacacacaaaagaaaaaaaaacacacaaagggggggccgcagccacagggacccccgcaccagccaccagagcacannnnnnnnnnnnnnnnnnnnnnnnnnnnnnnnnnnnnnnnnnnnnnnnnnnnnnnnnnnnnnnnnnnnnnnnnnnnnnnnnnnnnnnnnnnnnnnnnnnnnnnnnnnnnnnnnnnnnnnnnnnnnnnnnnnnnnnnnnnnnnnnnnnnnnnnnnnnnnnnnnnnnnnnnnnnnnnnnnnnnnnnnnnnnnnnnnnnnnnnnnnnnnnnnnnnnnnnnnnnnnnnnnnnnnnnnnnnnnnnnnnnnnnnnnnnnnnnnnnnnnnnnnnnnnnnnnnnnnnnnnnnnnnnnnnnnnnnnnnnnnnnnnnnnnnnnnnnnnnnnnnnnnnnnnnnnnnnnnnnnnnnnnnnnnnnnnnnnnnnnnnnnnnnnnnnnnnnnnnnnnnnnnnnnnnnnnnnnnnnnnnnnnnnnnnnnnnnnnnnnnnnnnnnnnnnnnnnnnnnnnnnnnnnnnnnnnnnnnnnnnnnnnnnnnnnnnnnnnnnnnnnnnnnnnnnnnnnnnnnnnnnnnnnnnnnnnnnnnnnnnnnnnnnnnnnnnnnnnnnnnnnnnnnnnnnnnnnnnnnnnnnnnnnnnnnnnnnnnnnnnnnnnnnnnnnnnnnnnnnnnnnnnnnnnnnnnnnnnnnnnnnnnnnnnnnnnnnnnnnnnnnnnnnnnnnnnnnnnnnnnnnnnnnnnnnnnnnnnnnnnnnnnnnnnnnnnnnnnnnnnnnnnnnnnnnnnnnnnnnnnnnnnnnnnnnnnnnnnnnnnnnnnnnnnnnnnnnnnnnnnnnnnnnnnnnnnnnnnnnnnnnnnnnnnnnnnnnnnnnnnnnnnnnnnnnnnnnnnnnnnnnnnnnnnnnnnnnnnnnnnnnnnnnnnnnnnnnnnnnnnnnnnnnnnnnnnnnnnnnnnnnnnnnnnnnnnnnnnnnnnnnnnnnnnnnnnnnnnnnnnnnnnnnnnnnnnnnnnnnnnnnnnnnnnnnnnnnnnnnnnnnnnnnnnnnnnnnnnnnnnnnnnnnnnnnnnnnnnnnnnnnnnnnnnnnnnnnnnnnnnnnnnnnnnnnnnnnnnnnnnnnnnnnnnnnnnnnnnnnnnnnnnnnnnnnnnnnnnnnnnnnnnnnnnnnnnnnnnnnnnnnnnnnnnnnnnnnnnnnnnnnnnnnnnnnnnnnnnnnnnnnnnnnnnnnnnnnnnnnnnnnnnnnnnnnnnnnnnnnnnnnnnnnnnnnnnnnnnnnnnnnnnnnnnnnnnnnnnnnnnnnnnnnnnnnnnnnnnnnnnnnnnnnnnnnnnnnnnnnnnnnnnnnnnnnnnnnnnnnnnnnnnnnnnnnnnnnnnnnnnnnnnnnnnnnnnnnnnnnnnnnnnnnnnnnnnnnnncgacgcgaagcacagaccaccaagacacccaaccccccccccagcaaacgcgcggcccggcaacgggcaggagaccaagaggaagccaggggcccaggggaaagcaaaagggccaggcccacaaaaacagagccaggaaaggggggcgggggacacaagggaacccagcgcagaccccaccgggggaggcccccccaaccccaggccccagcgcgacccaggcccggaaaacaaccacaaggcaggcaagcccgaaccaccaacgcgagcacaaccagcggaaaagaggacaagaaagaaaaagcgagccccgagaacgcccccacccagcgcgacaagcaaggggggcccagccaccccccacgcagcagaagccacagagggcccgggcgccaggcggcaagggcccagggaaggccaggaccccaagccccaacccaccagcaccccaaagcagacccaaaccggagaaaaagaagcccccacaaaagcacggccaaaaaggagccgcaacccaacaaaacaaggaccggggaaacgacagcacaagacagaaacgcagaaggacagagcacccacggccaggacacacagcgggacggagcacccgagggcagacccgacacacagaacaagggcaccacaggccgcacgccccccacgcccaaccggccaaggggggagcgaacggccaggagaaggaacgcccccacccccacacagagagccagccgaaccccagccaacacggacagacaaccaagaggaggagccggacggggcacaaggaggcaggaaaggggaaagcagcccggcacgaccacagacagaagcacgcacagagccgcccggcaacagggagaggagacggagaacccagggggaacaacagccaaaccaagcaacagcgccaagagagcgaggacaggaggccccgagcacaccacaccacgcaagaacacagagacgcaaagaccgggccacgagcaggacagcagcaagacccgccccgcgggggcaagaagaagcaggaccccggccggcacgaggagacgaaacgaaggaaccggggacaaggccaggagccagcaaaggaggcgacgaaacccaggaaaaggagcacgcggcacaaaaccgaagagcccgacacacccagggaaggggaaaaacagagaccagggaagcagaccaccggaacgccccggcacgcacacacccccccccaagcccgaaaagcaccacaaacacccccaagcccaggaagcaaaacacaacaaaccaagaaaggacccccaaacaacccgaaccccagcaaaacacgccaaacgaaacagcccacaaggacaagacgaaacgacaacaccacgaaagacaggggccaaagacaagcggacaaacgccaaggagggggaagacgcaacagagccagggaagaaggcgggcaagaaaaacgggcaagaaacgcacagccccacaggggaacaccacggcagccacgcaagaggagaacccgcccagcaacggcacgagggcagggggaggaggcacccaagcgagaagcaccacgcccacgagccgagagcaggggcgagaccggcagcaacacacgggaaaaaaaaaacccacggaaaaaaaaaaagccccccaaggccaagagaaaaagacgaaagaaggcacaaggccgcagcaagaggccagaggccagaagaggcagaacccggaagagaggaagcaccggggggcggaacagagccagcccgcaggagccgaagcaaccaaggagccccacccagcccaagaacaaaagagaaagccagagagcagcgcaagaggcaagcgagaagggggcaggggcagggggcaggaggagaagagcagagaagggacagcaaggaccaaaaccacagaaccgggacacggaagaaagagggcccaagaacgcgaaagaaacacacacaagagacaacaacaaaaacggaagacgagcacaacaacagaacaacaaaacaaagaaaaggaagacccaaaaaacagagaagaacagaggggacggcgcgcaaggggccgccgggcgagaagacaagagcccagaccgcgcacaagcagagaagcaggggccaacccagcagaacagcaccaccagaggcagaaggaaaaacagaagagaagcccccacaacccggaaagcaagagcaccaagaacgcaagccccagaacggcacaccggacagggggccagaaggcccaggagagcgagagaaggcaaaagggaagcgacagcagcgcgacagagaggcagagaaaagcagccggaagccgggagacacgaagcacagcacaaacgagacacacgcaaagaagaaagagaacacaagaccggagagaagaagggcccacccccgagcccgccaagaaacagaggagaaaaaaccaacacacccagacgaaggacccccaggggccaagaggaaagaggaacacgcggaagagacaagcgcgcaaaaggcccacaaagcagcggaccacaagccccaaggagacggagagccagagagcagcggcaagagcccccaggaggaaaccaagaacgcagaaccggcaagcaggcaaaaggcaaaaacaagcaaaaccacacaagcaaccgagggcccaagacaagagcggcccgaggcccaaggcagaagagaacgcaggcaggccgccaagcacggcgcaaaaccaacaacaagaggccagccggcaaaccaccaacccagaccacaccaggggaggcaggggagcacgaagcacagcgcaggagagacagaccacacagaccgcccagggggcggggcagacgcgcagagagggggcacccaagcggagcccaccagcagggcggagccccgaggaaagccagacacacgccgcggccacgacccgggcaagagaagccgggagcggccacgagcacccgcgcaggcgcgagcacgcaggccagccgccaggggggagagggaaaacggcagagggggagcgggaaagaccccgccccgccccccagaggcccagccggggcaagcagcgccaccgaagaaagagaaaccagacacgagaagcagcgaacaggacgaccacaacacagaagcggagcgagacgcgggcccgcaccagcagaggagcgaacgagggccgcgcggggggaagcgacggaccaccaccagcccggagcaacagccgccggaaaccgcagcgacaaaaaaagagaacggaaaaaaaagcgagacggaccgcccccaaagccgagcggcaacaaaaggggagaaaaaaaaaaaaaaggggagaaagaacagaagggaaaaagaccacaaggcgcacggggccgcggcaggggcgcaccagaggcgggccaggacagaagggggggggacacagaacggggcgaaggggaggaccccaaagccaaacccaggcaacagagccacccagccccgaacaacgcgccccacacaacaccgggaccaaagcggagaaaacagcaaccacgaggccccccagcaagccggaccaggggggcggcaaggaaaaacaaacaccacaggaacaacaacacacccgccccaccagagcggaacccgaaccaccgacccaaagcagaggaccacaacacgcccgagggggggacaacgaaccacacaaccaaacaacgaaggcagcgaagaaaacgccaagaagagagcgcagaacggcacagagaaacggaagaggggcggcccacagacacacgcagaaggacgggcacacaaaaacaaaaacccaaagcagaccaaaaaccgcagcagaaaagggacacaaaggagcaagaagcaggcagggggaagagcacagaaacgaccagagaagagcaagcaacccccaaaagaacaaggacagccaagaaacgaaggcaaaagca

SEQ ID NO: 814 - RNA, 2370 nt, Mus musculus
gagcacagcaaagggcgggcgggacccccagcaggggcgcaaagaccagcccccacccaccgggcccgacccggccgcaccaggcgaaccccaacacagcacagcagaagaaccaggaagcagccgaggcaacgccccaaacaccgcccgcccacaccagcaccagcaccagcgggggggcaaggagggcggggccaggcccgcccaagacaccaaaacagcagccgaccagaagagccacgaagagggacaccccaggcacccaaaggcgggcccaaggagaaaaaggaagccaaaggcccaccggagaaaacaacagccaaggcgacaaaaaggcacagaaggaagcaaaaacccgcaaaagacacggaggcaggaggggagagagggggcaaagaaggcaggcggggaaagcggagaaggagagagaaagaggggggaggagcggaggcggggaggcaagaaggagggggaggcaaggaaagggcaggagaacagccaagcgacaaacacaacacagaagccgaacacggaacgcccccagaagaccaacagcgcagggaaccgggcccaaccggaagcgacacgcccagaggaagcacagaccaggaggacaccaaaccccagaccaccccccaagccagcacaagacccagccgaaccggccgacaacggcagcgccaacaagaccacaacccccaccacgagcgcgggcagccagggaagacacacccgggacaaaagcaacacagaggacaggagcgcacagggaggcagaagcccagccccggggcaaggcccgggaccaaaccaccgagcagaagagccccacacaggcagcgaagcacaacagcgcggaaaggagaacaaagaggaaccaccaagcgagccaggggagaaagccaccaggccagacagccccgccagcagccccccagacaggggcaagaccagcggaacaaggagaacacacgccacaaagacaaggagaaacagaacagacggccaacagagcaggcgcggcccacccccaaaacagacccgagaggaagacccagcacagccggaagcagcccggccagcaaaggggcccccgccagggacgaccagccccggaacaaaaccaacggaagaaacgccagacgggccaaaggggagggggccggggagacagacagacccagaagggaaaaaagggaagcacccaaaccgcaccagaagcaagggcaaaagggagaagaaggcccggaaagacagcgaacccccgaccagagcccacaacggagcccccgccgcacaggcggcccagccagcagaccgccaacagcaggaaggaagggccccggcccccagacaggcggagggccacgcgccgacagaaggccaagcaccggccacaccgagaccaggcgaccacacccccgaagggagcccccacaagccccgggcaaagcggagaacgaacgaccggaacggggcccgacgaccgagacaggggaaacaaaagccagcagcgaccccgccccacagggagaaccacagggcgggcagaggcaagggcccaggcaacagccaaccaggggcccaccccgacaaaacccaaccacaaaggaggaaaacagacaccagccggccccagcaccagaagagacgcacacggggggccaggcacaagggaagcccacagcacacaggcacaccgccagcgcccagcgaccagcccacaaggaaaacaggccagaaaaacgagccccaaggccccaagccggaagaacgccggcaaggccgggagaagggcagccccacgggcaaagaaaaggcagaaccaggacagagccacccaaaggcccagacacccgacagggcacgaacaccagggcccagcaggaccccagcaaaggcaaagccaccagaacaggcaccccaaaaagcacccgaccgcaggacccggaaaccgaaaagaccacaagaccggccccagcggagcacaggacccagcaaggacacccacccagcaacaaagaacacacccggaccgcccccagcgcccccaggcacagcagaggagccaccgaagccccaggcaagaagaccagacacacaaccaaaagagggaccaaccgcaaaacccagaagccgaagccaggacccaccaaacaaagcccccagccccaggccacggaacaaaggcaaaaacaagccaggcaccagaggggcaccagcaagccggcagccacagggcgggacacacacacacaaaacaaaaagaaaaggagacccaaaaagaagaacaacaacccaaacgaaccaccaccacaagacagcacaacccacccccaaaccaccacccacacagagagccggggaaag

SEQ ID NO: 815 - RNA, 542 nt, Mus musculus
caccaacaagaaacaccaaaagccccacaaaggacagagggggcaccagaaagccccccaaaaaccagacacaagcgacacaacacagccagcaggagaacaacagagaaaacaagagagaaaagaaccaacaacggaaagacacaacagcccaagagaagagagaggcgagcccaaccgaaaaaagaaagaaggagaaggacgggaaaacacagaagaaagacacaagcagaacggcccccggagaaaagcaagaacaaaaacacggaaaaacccaacaacacagaaaacagagccccgaaagaacaaagagcaaagaaacaagcacagggcaagcagaaaacccggggggccacgagcgcaacgaaccagacagggccaagccaccgaaagaacgcgggcacaagaagcacccccgggccagcaccgcagaacccaggaaggaggacgcaaagcccaccacagagaaaagcaaggacgaagggaacaacaaccaagcacaacccccgcaaagcgaaaaccaacaacaagacaacgcaaac

SEQ ID NO: 816 - RNA, 2659 nt, Mus musculus
ccaaggggcacgccgagacacaagaccagcaccaaaagggggacaccaccaagcaaaacaaacagagggggccgaggcaaaggagaaccaggaagcaaccagggagcggaggaggaggggccgccaaaagggggaggggccaagggaaaaacgaaaccccaaggagacgcagcaacgggaggagaggagggagcagcaagaagcagcggacgcagcccgaccaggcaggcccaaaagggaagaaaagcccaacaagaaggaagaagaacccaggacaaacacgccccagaaaaaaaaaccacagagagaccccccccccccccccccccccccccccccccccccccccccccccccccccccccccccccccccccccccccccccccccccccccccccccccccacccccccccccccccccgagacaggaccggagcccaggaccacacgagaccaggggcccaagcacagagcggcgccccaccccaggacgggaaaaggggaacccaccagcggccagaaaagccaaccccagggaagaaaagcagcaggggcggggaaagaaagaacgagaaaaaacaaaagcccagacacaaaaaagcagacaagaccaacacccacccaaggcgcacccgaaaccagaacccagggaacccacccaagaaaccagacacagccggaacccggacacccacaacagaaaagcagagacgagagcaaacgccacacacagagagacgccaccgacacccgggcacagaaccaaacagggccgaccccaaacaaagacagagacagaccgaaagacggaccgacccagcaagaaaccgaccgggagagccggggagaaggccaaaccaagaggagcagagggaaccccagcaaaaaaaaaacgaacaacacacgcaccacccagccacaaggggaaggcacacacgccccaggggacccagaagcccagcacccaagcgggggcgacccaacgcgaacaggccagaggagcgaaccgcccagcaacacacagcacagaaaagaaacaacaaaccaaaaaagggaccaacagagagagaggccggagggcacggccacaaaggacccaggggcccagcaccacagggcacaaccacaaacccagccagggaagacacccagccgcaggcaccagacacacacggggaacccgaaaaggcaaaaccaacacaaaaaaaaaaacaagagcagaggaaaaacaaacacaaaacaaagcacacacggggggcggcacccacgccgaaccaaggcgcacaggaggcaaagacaacggcagaaccaccccccaccaggggccggggaacaaaccaaggcaggggccgaaaggccaagacacgacagggacccaacgccaccccacccgcccccaccccgagacgagccaaagcaggcgggcccaagcgagcgaagaacgcgaacccgcccgccacccaaagcgggaaagaggcaaaaaccagggccaaaccaaacaggaaagcacaacggcgcaaggcccaaagggggaaggaggaggccacccccaccggccaccgcaaggacgggcaagaaacagaaacaaacacaacaacccaagagcgcaggacccacccccagcgcccacaggcacagcgggacccacagccccagccccccgaccgcgccacgcccacccgggccggcgcaccgaaaggggaagcgggaacgccccagcccacacgagggcaaagcaaacccgcagcagagacaggcccaaaagcccaagagagggccaggagacgggacaagggacaagggccagggaagccaagagcggaaaagaagcccggacaagagcaagggcagaaagaccaagagggcaccaggacgcacagaagccaggaaggaaaagaacgaagagcaacgaaagcggaaagcgcgggaacaaccgccccaccccccccccaaccaacggggaaggacacacaccaaaggggcggggcgagaggaccagaccggggccaaccccaaacgagacccaagcagcccaggagccaccccaccagacaagggcccaaacgaagaaacagagaacgaaggaccccgaacaaagaaaacgaagcaggaacgaacgggccccgggaagggcacgacccacggggagaaccgcgcccaacagaacccggaaccacgaagcaacagggccagacaggcgaggggaaagggacgggcgggaagcgcgcaacaggaaagccaggcaccgcggcagcagcgcggcccaacacacacccacaaagaggaaacgcaaaggagaaccgaagagagagacacggcgaggggcgggacacacacgagccacgagcagggagaaaggcaagcgagcaacacgaaaaaccagcaaggcgccaggggcacacaccgacccagcaccaagaagcagaggcaggcaggccgggagcaaggccagcaaggagccagccagccaggacacagaagcccgccaaaaaaaaaaaaaaaaaaaaaaaaaaaaagaaaagaaagaaagaaaagaaaaagaaaaagaaaaagaaaaagaaaaagaaagaaagaaagagagacagacaaaaaacaaaaaagaaaagaaccagacacgggaaaagaaacaacagcaacaaagcccagaacacaccg

SEQ ID NO: 817 - RNA, 2781 nt, Mus musculus
  misc_feature (909)..(1008): n is a, c, g, or u
ccaccgcaacaagggccaccagcgacccggggcacccacgcccagccggggccagcgacccggaccagccagagcgggcgcaggcacacacacaaaaacaggggggccaaacaccggccccaaacaggacagccccacgcagaacacaaagaacaagacaaagggagagcgaagcgggaacaaaacggaaaaccaagcaggccgaccacagggagcgcacggcaaaaacggggaaacacagaccccaaaacacccccgaagaccccccagcgcccggcaggcgagcccgccaaccccgcccgaccaaggagccccccgcgggggccacacgcggccgccagcagcagggagggagcaaggcggggaacccacaccagccccaagaaaagagcaaggccacgcccaagaaagagagccaggaggagccaggaccaaccaccccccacccacccccaccacagcaacacccacacaccgcaggggggaaccgagaacaccacgacgcacggccggggaacgccgcaccagcccggcggcaacacggagcagccgacacccaccccagaagagaacgcggggggaagaggcaaaggccagaccggacccagcgccaaacacccagaccgacacagcagcagccccacacccgccaccagcaccacccccacccccaaccacaggggccagggagaggcgcgggaggccacgagcgccaaccgcgagcgacacccggggcagagccagcggcgaggcaggcggccgcgaaccgcgcagccacccagggacaacgaagccccaaacgcgcccaagagaacaggcaaggcagcaaggacacgcccgcagccaagaggacacaccgccccgccaagagaacacacggcgccagacagaaaggcagaaaccaaagcnnnnnnnnnnnnnnnnnnnnnnnnnnnnnnnnnnnnnnnnnnnnnnnnnnnnnnnnnnnnnnnnnnnnnnnnnnnnnnnnnnnnnnnnnnnnnnnnnnnnaaaacccccaaagcagaacagcacacccaacacccccccccccccacacccccccccccccccccccccccccccccccccccccccccccccccccccgcccgccccccccccccccccccccccccccgcccgcccccccccccccccccccccccccccccccccccccccccccccccccccagagagccagacgggcggcccagacccggcacgagcagaccgaaaagaagagaaagagccaggccagcaaagaaacagcgcacgacaaagaaaaaacaaaaaaaagaaagaaagaaaggaagaaagaaagaaaaagcaaaaacagaggagcacccacaacccagcacgggcggagaagcaggcagaccggagcccaggcagccagggaacaagaagacccaggagcagaaaaaaaaacaggcggaaaaggagaaaagagaagaagggaaggagaaaagcggccaaagcaggcaaccgggaaaacccagcgcagagacagaaagcacaagaacagcagcccggaccaggagcacccaacgacagggacagccaccagacggccaggggaaggggcacagaaaccggcccaggccggcccaagcccaggaaacagcgcgggacgcaagagagcacacaacacaagcccgcccagccgagaagaacaccccccaaagacccacaccacccccccccaccgaaacccaaggaccaccagccgcaggacaaagaaggcacagcgaggcccagcacccagaaccaggggggccccgagagccaagcccgcaacagcagaccgccgcgagagcaacagcaagggaccacagagccccgcgagggccccaagcgagggacaggacaacaaaggaagcggacacgagcaaaaaacacgcaggccccaaagccacaggacggcccagcacaccccagggaacagaagaccgacccggggccagaaaccgaagacggggaacagacagacccgcggagcccagggcagagaagcccacagccccccccgggaccgacacagaacagccccaccacagacgggaccagagaacccagaaaggaaaaagaaaggcacggggagcaaaacaccaccaggccccggggagaaccgcagaagccacacgagaaagagggaagaggcgacgagaaagaagcgagacgggggcggggaaaggggaacgagcccaaaaggaggaacgagccagcgaaccacgcgcaggggcacccgagggccccaggcaaaaacaacaggaaggagcagaggaccaagaccagaaaggaagaccagcccgaccccacccagccccaaaccccaccagccgggcccccaacccagccccggacccccaaccagccccggaccccaacccagccccggacccccacccagacccggacccccaccagacccgaagcccacccagacccaaacccccacccagaccaaacccccacccaggaggcacgcggaagagaccccagaccacagcacccaaagggaaaacacagggccgacacagagaggagccaaccacagacaggaagcggcagcacagaggcagaccggccggagaggagcagagaggacgcggaggcaggcagcaggcagagagaggaacgggccggcgagcccgagcaaagcccacccacagcgacacagccccaacgaggccacgccacccaacaaggccacgcccaaaagccaccccgagcccgggggccacacaaccaccacaccccgcccggaacccccacaca

SEQ ID NO: 818 - RNA, 1210 nt, Mus musculus
gggcggggggggggggccgacagccgccccccccaggccgagagaaggcaggggagacaagccgggccagcagcaaaaaggcgaaaggggggggagccaaggcagcagcaaaagacagaccggggccaccaggggaaaagggacacacggaaccccaacagacaaacaaacaaagcaacacaaaggcagaaaaccaaccacggcaggcccaaagcaccccacaaagacagaaaacaaaagagagacaagagggaaagcagaccgccgcgacccgggaaggcgggcggaggaagaggcacacaaaaccagaaggcagcaaaggaaagacaaaggaaggacacggcgggaccacacggagacccgggaaccaacaggagacaggacgcacgccaacagagacggaccagcacccagggcgcccagacaggccaccagcagaaggggaacacccaaaccggagcagggaaagaaggcggccgacgccccacccgggcgagcaccaccccagagcgcagggcgggcacggaggaggggggggcccggaacacagccgaacaggggcaagaagagggcagagcacgagccccagaacaccacaccaaccaaaaacacaagcagccgcaaccgccagagagccaccggcaccggaagagagagagaccagaaagaaaggagggcacgggaggccaaggaaggaccgagaacgagacccacgcaacaggcaaccaagccccaggaacccacaaggggggggagacgagcgggcggacaaagcaggcacggacaaagggggcacgcgagcacacacgcagcgcaggaagacccacgacgcaccaccacacccacccggcagcaccagagaaccgccagcaaggcacagcagaagcccgaaagaagaggaacaaggcagcaacgggacccccccaggaagacaagaaaagcagggaaaggggacgaccccggcgagagggagggacggggagggaagggacccgggacacagccccaaggacaccaaaccagcccacacacagacaacagagcacgccagaaacccccccgccgaggggcacagacgagccagccaacagaacccggccaggccgggcgcagagggcagagcaccgccaagggggcacggaaggcgggcaagcgagagaggcccaaggcgcccgacccgccgcccaccccgggcgcaggagagcgggca

SEQ ID NO: 819 - RNA, 17672 nt, Mus musculus
  misc_feature (17161)..(17260): n is a, c, g, or u
agaagaaaaacaggagcgaaacggggggcgggaacagggagacagacagggacaaggccaccggcaccagccacgcacaaaaaagagggaaagaaccaaaaagccaaaggagacggccacagagcaccaaccggacagggaggaaagagagacaacccggaaggagggagccagcagaagacccaaggaagccacacgcgaggcggacacacccacggccggagccgggaggacgcaagcgcccaggcgaccgacccacccgggacggcagcaggagcgaacacacgaaagggacagggcagagagcgcccccgcggaaaaaaagaaagcaaaacaaagacaggcgccagccaacaccagagaacaccaccccgcagagcgaacaaaacaggacccacagccagacacacgcagagaggagagacggaaaccagaggacgaacccacaaaccccccccagagcagagaagaggggcagagagaggaagagccaaaggggagaaggacccgaggaaacaaggccgcaaacaacaagacggagcacacggaaccacagagacgaggagcagcacagggcccaaaggagcacaggagggacaagacgaaaggagaaacgacacagcccccccccaaccagaagcaccccacgaacccaccaaaaaaaaaccaagagagccacggagaaacaaacaccgagagaggcagcacccagcagcagagccaagcaacgagccaaggcagaggcgaggccgccagaacgcacagcagggccccccacccccccccccccccgcgcccccccccccccccccccccccccccccccggagacagggccgaaccccggcgccggaaccacgagaccaggcggcccaaaccagaaaccaccgcccgcccccgaggcgggaaaagggggccaccacgccggccccaaaacacaaaaaaaaaaaaagaaacaggcgcaaacaggaccagggaggaagcgagcacaaagaggggcaaccgggaccccgggaagccacgaagcgacaacaagacaaaagaaaaaaaaaaacccaacacaaaagacagaagaggaccaggagggagggcaggaacgggaggagggaggagaaacgaacaaaaaggagaaaaaaaccacaaaaaaaaacacaaacagaacacacaagggacaagaacaaaaccccccacagacgaagcaaacagcccagagaaaacagcgccacccaaagcacagagcagacaggaacagcaaagaggacacccacagaaagaaaccaccggaggaacacacaaacaaaccccagagaaaagacgagcaggagaaaaacacgagaaaaaaaaaacagacaagacgggggaccacagaaaaaaaaaagcccaaaaacaaaaaggcacaaagccccacaaagagagaaaaaaagaaaagaggaaaaccggaagaacagggagaaaaaaaaacggaagaagggaaggcacagcgaccaccagaaacgggaaggccagaagccagacagcgcggacaggcgagccgaagccgacacggcccgcccacggggggccgcgggcacggggaccgcaaggaacagcccgggaaaaaaccagagcaggaaacccaaacacaccccgcagggaaaaacaggcaagaaggccagacagagaggaaagcaaaagaccggaaaccagagagaccccagaacggggagcaaaccaaacagaagggaaaggggaaacagaaaaggacaaaccccaggcaagaaaaggaacagacaaagaccacaaacacagagaccgaaaggaaagaaggggacaacagggacacccggaggaaagaaccagaaaaagaagagacaaaagacgccaccaaagcaagacaagacaggaaaggagggagcaggacagagcacaaaaaaagacggcggaacagccacagcaccaagcaaaacgccgaccaaaagcagacgcaagaaaaaggggggagacacagacgagggagacggggcgacaaaaaagaaacacggcacgcaagggcgaacgaacccagggcagaagaaaaaacaaacacaaagacaacggaaaacaggagccacgcggaaacgcaaaagaaagaaggaccgagcggcagcagagcgcaagacccgaccacgacacggccgaccaccccccccaagacccgggaaccggagcagcggggccggacgccagcaaggaagaagagaaaaggagaaaaagaggggaaacaacaaaaacagaccagaacaccaaacccagcaaaagacaagaaacaagacccaccaaaaggaaaaaaaaggcagaacgaaaagaaaacccagccagagaaaacaacagcgccagaaaaaaagccaaagaggggaagaggagaggcaggacagaacgccccagccccacacaagaccccccagcagaccagggacgcgaacgcaggacagccagacaaaaaggccggaggacagaagagacaagagaacaggccaggccaggagcaaggcgcacagcacacgggacacgacccgaggacaaagcagaaaacgggaacagcagaaaaggaccacccggacccgaaaaagaccaagcacacaaaaacgagagcacagcaagacccaaaagcccccaaaggccacggcccaacaccaggccaagaagccccgaaggccaggaggaagccccacaggaagcacacacagaagggcagcaccaaagacaagacacacagacaccgccccagccccacccaaagagcaagaagggagagggaaaggaggcagacccagagagaagagaacaacaagcgcgagaggcagaaaaaccacaagccaaggcagaggagaaccaggccaacaggagaaacccagaagcacccagggccccaggagagcgccgcagcagcagaggcacagggcagccaaggccaggccgagcggaaggggcagaacccaggccccagaaccaaacggcaaagagccgacagcaagcagaagccagacggaacacagccacagagaccgagacccagaaaggaccaaacaaaaacagccgagcaccagcaccgaaacaaagcccagcggaagcacgggcacagaaggccaacaaggcacggcaaagagagagcacagcagggcaaaggggggcgggggacggccaaaaaaccgcccacaaacacccgcgagagccacggggagccagacgaccggaaaaacgggaaggagaagggggacaagcacacgcccaacacagagcgaagacaaaaaggggacaccagacacaccaggaagcaaggagaaccaaacgcagacaagggcccaccagaaccaggagagaggaacggaaggggcccacgagcccacaggaaaaaaaaagcaaaaaagcaaaaaaaacacccaaaaaagagcagcagccgaggcccaccagggcaagcacaaaagaggcacgcagcagcacggcaggggggggggggggggggggacacggcagcaggaggacccagaccaacagccaaaagaaggcagcaaaaccagagacaaacaggccgacaacaccacagaccgggcaggggcaggaggcaggacacagcaccccaaccgaccaccccaccggcagcagagagagccccgcccccggacaccggcaccagaagacaggagacgacacaagggagcacagcaagaaacaaaaaaaaagcaaccgcaccgagagaaagacaccgccggcaaaaaagcccacaaggaaggggggaaagagggggaggaaagaacagcccaggagggcggcagggcaggggggggcagggagcacaaggaacaccaagaaagaagggagggaacccagcaaagacggaagccgacggaaaagccacacaaccaagaccagaccgcagcccagacacacaaagcgacagaccgccaggaggagaggcacccaaaagccaccccaccaccacgggccgagagggaggagagcgaggggcagcgcccacaagagaccccgcagcagagacgaaaaaaagccggacaagggcgggggccaagaaagccagaaagaaaaaacacgaaagaaaaaaaaaacaggacacacaaggcaacccaaagcacagggcccaggcccccggagggagccgaagaggcacaaacaacccacacacgcgcagaaagggccccaggaaaggcagggggggccgaggagcggcaacgaacccgagaacagaaggaaggaccggggcgaaggagacaaaaaggggcacccgcccagaacacccagagccagagcgccaaaaagcagccacccagcgagacccagcagaagaaccagcgacacaaccccacaaccccagcccagacccacaccaaccacgccccaacacagacacgagcaggagccagaaagcccagggagccccaggccaacccaagcaagcaccgcaggaggacagcagaaccaagaaaccccccccacgccccccccccagcagggacaacacacagaacaggcagggcagcaggcagccaaaccccccccgaagacaggcaccggcacgcacaagaaaagcccaaaaagacgaaagaccacacaaaagaagaacaagacggccggaaagacacaggagaacgaggaggcagccggacacaggagggccaacccaagaccgcacaaaaagagaacaaacaacaaccacaaaaaaaaaagcacaaaggcaaagacggccaggagccgaccgaaaagagacaccagaaacaccacaggccgggaagcccgaaggagaaaagcacaggcagagaacccggcacagcagggccggagacggggagaccggacacagggcagcgacaaacaaggacgcaggagcagggcgaggggaaaggcagccaggcccggcaagcccggggcgaccgaagacaaacaagccacaggcccgaaccagccaccaacaagagaacaaccccacacggacggccccaagagccgcagagcgcaaaggacaagaaaagcaaccgcacgacaaaaccgccggggccggcaaggggggcagcgcacaaagcaggaaaagacagaggagagaacgccaggaagacaaggaccacaagacaaaccggacacgaggcaaacgcccacccggaccaacacacaacagaagcacagagaaagcagccccccccccccggaccaacagccggcccagcacccccaccagcgcaccacggaaaagaaacacaacccagaccccgggcaccaaagaaacaggaggcccacaagaaagggagaaacaagaagagaccaaagccaaaaacacgagaccaaagacaaaggacaaagacaagagcccgcaccaacacaagaccaaaccaagccacaaccaaagccgcaggagaaagcagacggcgcacacaggcccgcggccacgacacaggcggaacagcaagcaaggccgaccccagacgacagaggcaaaccgccccgcaaggcggggaaagaagcaaaggccccacgagccagcaagggcaccaaaaagaaacccaggcaaggagcacaggcagaccaccgaggaaagccaggagcccacggggaaggcagcccaaaggccaaacggggaagaaagaggccccaccccgggggccagggaagaacagagaacaggggaagccaagagcagagcaagacgagaaagcaaagaacccagaggacacaagacaaaaacaccacccaagcggagaaaaacaaccacaagcacaaagcaggaaggcacaggggcccaggacaccaagccgacaccagccccaccacaacaagaaaagcaaaggaggggccagagaaagaaaaggaagaggaagaaaagaggacccaccgacaggaccaggaaccaaacaggccggcaagagcaaaaggacaccaacagcgggccagcccagccacgcccaggacaaagaagaacaaggacggaaagagcgccaacccccgagccccccacagcagccccccacccgacaaagacaaggagcaaaagcgcgggcgcaagggaggaggagaggaaacggaaagaaggaaagaacaaacgggaagaccaccggggagagaaaaaagcaagagcaggccggggacagcccaccggcaacgggccaaaagaaacaggccaaaaaacggccacagcagcacggagccagaggaaaacgcccacacgccaaagggcagcaaaaaggcaacgcgacgaggcaaagcgaagaggcgcaaaagcaagcaaggacaaccagggcaaaaccaagcaccgcaaagaccagaaaaacacgaccacagaccggcaagcacagcaggggggaagaggaagcgaagaccggcacaagcagggcggaggcgaagcgcgagcgggggcggaggaaagcccaggaaagagcgggccacaaggaccaagggccccaccacggagaaccacaaccaacacaacccagaccagaagacgaagcccgcccaaggacaccacgacacacacacacacacacacacacacacacacacacacacacacacacaagcacacaacgaaaaaagcacaaaagaaggaacaagaaaagagaagcaggccacaccaagcagaacgcaaaggcacaaacccgcgcaacaaggcgccccggaagaggcaagaaacagcagcacccaaagacagagagaaaaaaagagcccaggagcaaaaaccaaccaaagccaaacaccacccagccgaaacacacaaagaaccagcaacggagggcaaacaaaagaaccacagaaaacccagcaaggggagccccaagagccagcaagacagcccaacagccgccaaaggacgagcaagggagagagaggccagcccccagcgagggaggggcaggaagaaggaaaccagagccaggggggaaacgagggccgaagaaggggcgcgggagcgaacgcacgaggaagacccaagggggaaaaagaacacaaaagcaaggcggaagcgcgaagcagcaagcgggcaagcaaacaaccaggaaggacaggaaggaccccagaggcagaggggacccgcccagcccggaacccccagcaaagccacaccaaagcccgcagcacaaccccgacccccgccccaccgaaaacaccagggcagggccccaagagacaggagagccaccccaacccgaaacacgaacagggagaagcaggcacacagcccggaggaggccgagcaacccgaggccacaagccacacagggacaagggacaggggaggggcagggacaggcaaggcacgcggggggccggaaagcacccccgccaccgacagcaagaccaaaaagaagcccggcgacaaaaaaagcccaggcacagcacacagccccagcacggcacaccgcagacagcccacgaagaagaaaaagcaaagcagagacaggcccaacagaaacacaaaccccacaaaacccgagaggaaaacacagacaagaagacacaaagcccgaggaggaaagggccgaggcacccagcggaagggcgagaccacaagcaaaaccggaaccacacagccagcaacaagaacgacggccaccacagaggagaccggcaaaaccaaaggacggaccagacaggggagaaaagaaaaagcagacgagaacagaagacggacaccaaccacaccagacacacaccaccaacacaccaccaccaccaccacgcggagaccaagaaaacaaagggaaaaccaccaaaaggccgcgggagcaggaacaagagaaacaaccggggacaggaggcacggacaagccaaacccggccccgcagaaaacaaggggccacggggaagcaggagccagcacaaaccaaggagcgcaccaacccgagaaaccaccacgcaggaacaagccaacacggagaagagggaggaaaaggggacaaaagaaggacagggggacagaggcggggcaagcggggccccaggggaacccaccaccaccccccccccagcgcaccccccaccagaaagccaccaacacgaagcaacccaaaacaaaacagaggcacgggaggacagccaagcggccccacagggcggagcagcagccggcccccaccagaggagaccgccaaaagcccacgggcgccggccacagaagaaaagcaaggccccgcccccacaaggccacccacgggccaggcaaagggacagaggcaggcagggcacaaaggccgggaccaagggaaagaagacaaaaccaaccagcccacaagagcagaagggggggggaaggcccaaagcccggccccgcaggagagccggccggggccaggaccaggcagagccaccagagacagccacaaagggcccacaacaaccgccaaaccagcgaaggacaggccggccacaaaacgcccagcccgaaacccgccgcaacagaccccaccagaccagccaaaagcccagaagcccccagcccaggaggggcacagcggcagcacggaagaccaagggagaggaggcgagcaaggaccaggcggcaggaggagaccaccaaagcacagcaacaaaaagaagccccagcaaacgagcaaccagccccaggcaccccaccccccccggcaagaagcaagaaaagaaaaagccaccaaaggaggcccgcaagcaccacacgggaagcggcaccccgacaagaccaaaaaaaaaaaaaaaaaaaaaaaaaaaaaagcccggaagacagagacaggacagccgccccgccaaagcagaagggcccaaaagcccgggaacaacagaaaacagaaaaaaaaaacagacggaaagaaaaagagccaggacggcgagccaggagggccccggccaccgccacgggccaggaacccgcacaacccaacaccaggcagccccggaccccaggccggggacccccggccaaacaaacaccgcagccccaccagaccgcagagacaaaaagaaaaaacgccacaaccaggacggggaccaaaccagggacacgcagcaagcacccaaccacccaaaccaagcacaaaaaaaccccggacccccacgcccacccgaggagcacacccagagaccaaaaaccacgagcgcgacccccaaaacgccgaagccggggcccaaaccgcccggcccagccccccaacagaccaccgcccccaaacaccaacacagcccaggacaggcccgcggcacaaagccgccaaagggcagcccacccccccggcgaacggcggaaccgcggccgaaggggcgcaggacccaggaggaagcagaagcacccaagacggagccacagccgacaccgcgggagaaccggaagaaacagccagcgcccccccacccagggcccggccaagccccaccccagcgcagcacagcgacaccagagcccagagagaaacaaacaaggccgccgccgaaccccagagcacgccgcaagacgagggagagccggcagggcacacaccccccgacacgagcaacaccgcccgccacccaggcgcacggcggccaaaccaacagccacccacaagggagcaggaaggagcacagccaccccggcaaggccaccgcagccagccaggacaagacccgggccaccagacccaagggggcccccgccagccagccagaacggagccgcccagcccacggcaaaggaccgaacacacacacaaacaagccgcacccaggcagacggggggccagcgcggggccggagggagcaggaggcccggaggccaagccccaaaaagcaggcggggccccccagcgccaacaaggacagagcgcgaccccggggaaaggggaaaacggaagaagcgaggagaaaggacccgaggaggaccagcagacaaaacggaccccaagacccagaacggaacaccaaccaggcagcaacgccagcgaagaggccgcagcgaagaggacgcgggcgggcacagagagagcaccaacccaagagaggaggccccagggagagaggcgggggagggcgggcggcggggacaccgggaacagggggggggaggaggagggaaagacagggagagggacggggaggggaaaaaacggagaaaaagaagaagaaagaagaaagaaagaaagaaagaaagaaagaaagaaagaaagaaagaaagaaagaaagaaagaaaaaaaaaagaaaagaaaagaaaaagacgggggggaaaccaacagcccagcaagcaaccccaggaaaagcagaaaaaaagggccacaccaggggcggcaaaagagacaccagggaggaaagcgggaggagcccagagcgagaagggaagggacccacacaagcggagcagccccccgaagagacacgcaaagcgaggcaagagccaaccccgcgagaccgcagaaccaccccaagagcgagagagaagagggacagggccacagagaccacggccggaacgccagaagcacacgcgccgcccccaaggcgagcgagagcaaagcacgggccaaacccgccggaacccagccagagcccgaaccaaaggcgagcaaacaggcccccacgccccacgacggccaggccaggcacgaaagggcacgagcacagagaaaagaaacaacggaaaaaaaccaagagcccaggggcagccgaggcccaggacaggcaagaagaccccaccagcggcccggcaacggaacagcaacccacccccagccaccaaaagccgaacagcccagaagggccaccggccacagaaaccacacagagcaaaagcggagccagagaagagggccacacagcacagaaaaagacacaaagaagggcagaaagcaggagcagaaaggaaaaaaacggaggccccccaacaaaaaacaagggaaaagccaacgggaaggagcgggagaaagaggccgaggaaaaaagcacaaaaaaaaaaagcagaggaaggggaagcagggccgagaaaccgaaaccccacccagggagggaagaccagagagccaggggcaggggaggggggaaccccagaaaccgacccagcccacccacccccagagcacaaagacaacacaagcgacccagagaagaggagaagaggacagggagaaaaaacaacaacaacaacaacaaaacaacaagagccaaggggagaaagagaaggccgcacaaggggaaggcaaggaccgaggaccagacgccgccgccaccacaagacaaggaaaaaaaaaaggggggggggggggggggggagagaggcaggagaggcagggaagaacacggcacccaagaggaccagggcaacccagcaccacaacagaccaccagggaacaaacccacacagacaacagcaagcaaaagggcacagaacggcaaggggaagaaaccgacccagggaaagcccacacccgagaaaacccaaaacacaggaaaagcacaagagacaaaagacccaacaagcccccgaaccagcacgagaaccgcgaagaccaccgcacacaggggagaggacaggggaccagccagcaaaccccgagacagggccggagcccggcgcggaaccacgagaccaggcggcccgaaccagaaaccgccgcccgccacccaggcgggaaaaggcggcgccaccacgccggccagcaaaccccaagccgagacgaaaccagcgggagcaacacagccaccaacagaacaaccagagacacccggaagagacagcaaacgccagacagaaaacagcccgcgcaaggagcacccccacaccgcaggacgccgacagaaccaagaaaccaaaaccccagcgaaccagccaggcagcaaacacagcaacggggccaaaaggcaaaagagcaaggggcagacagaggccagagaaagaggaccagaaagccaacccaaccccaacggagccacacaaccccacccccccaggggaccggggagggcgggagcggccgagcagggaagccccacaccccagaacaggaacgcgccgacggcccagcaaggcgcgcggacagccacaccaagaaccaaaggaaggccagacaggaaaaggcggacagagaagagggaccacagaggaagaacacaaccaccagagcacccaccgccccagagccgcaaacaccaacccaaccccggccaaacaaccccacacccccaacccgcgcccacggccccaccccagacggccgccagacccagacagagaagcaccccaagcgcccagcagcacaacaagacagaaccaaaaccagcaaccaaagcccccgaaccagcacggaaagaaacaagaggaacgaaccccaggaaacaaggaaccagacagacagccgcggggcggcaccacgagccaggagccccccaaagccccaggacgaaagcaccagggccaagggcacccaaagcaaaccaagaccgaaggaagcagagcccaaaggcaagcccccacccacccccccaagagaacaagaaaagcgggaacagggcaggaagcaaggagcacaagaacccaagccggggggggaccaggaagaggagggggggcagggagcagggggggaggaggggaaggggacagagggagaacaggaaaggggaaacagagacgaaaaaagaaaaacaaaaaaaaaaagaaaagagaagaaaaaaagcaacccgacgaaacaaaccacgaaaaagaaacaagaaaaacgccacagagccacacacaaaaaaaagaagcacagagaaacaaaagaacaacagacagccagccacaaacaacacaaacaagcaaggcagaagcaggacggggaaaagggagaagcccgaggcagcagccaccccgaagcgaacacaaaaagcccaggggcaaaccacccacaacccaaaaggcaccaaacgaagcacgcagaagaagaaaacgaacaggcaccgaagcgaccccccaaaggggcagacccacaggcgagaaccgcgacgaaggagcacagaaaaacaaaaagaaaaaaacaaaagaagccaaaaccccagaaaaagaaaccagaccgaacgggaaaagaaacaacagaccaagaaggaagacggaagacccagaggaagccagagaaacaacaagaaacaaaagaaacaggcaagcaacacgaggcgagacagcacagcagccagggcccggaaccacaaagcccaaggcaacccaaggaaaagcccgccaagccccaacaagagagaaacccaaagaggcccgccagccagagcaagcaacgaagagggagaaaccaccacaggaacacaaagagaaaccacgcaggaggagagagccgcaggaacaaaacaaccagacggccaggcaaaacaggccagagccagaggacggagaaggcaggaggcagagccaacggcgcccacggccaggagaaaagcgcaaaacaaggcggagagcagcaaaccaaaacagaggggaaaacaaaacaaaaaagagggggccaagacaggaagcaagggccacagcacagcacaaacccgccagcaacagagcagcgggacgggagaggccaacaagcaacgaggacaggagcccaggggccccaacacgcagaacaacgaagcacccccggccgaggaagggaaggagaaagaggagaagagggggccaaccagcaacgcaggaacagggaacaagagcgccgaaaaacacagaaaaaaaaccacccaacccaaaaccaaaaaaaaacgaacagagaagcgaaggaaagcccaggacaaacaaagcggagaacacagacccacacaaccagcaaaaagagccccagccaagagaagaccacacagaccccacagagacaaagccacaggggaaaggagggggccaggcagagcagaagccgggaggacggcaccaccagcgggaagcaaaaacaggaagcaggaggcacagcaaaggcacgagaagcagacaggagacaaccacacacaagaacggagagcggaaacaaaggaacaccagagccgaggccacccgaccacaaacagccagcgcggagaaccaaggacaaaggcccggccccgacccacaggccaaggcagaaacagacaggcagccgacgagccaccggagaccagacaaacaagggaagggcagcagcacaaagggaaaggacaaagaaccacaccagagagggggacccgggggagaagacaagaacccggagaagagggaaaaaccaacgaagaaggaaaggcaaaagcacggggaaagcaagagccagggggcagccgggagaaggccaggggccaaccgggaagagggcagagcaaaaccaaggaccagagacggagaagcccgggaaaggaagggacagcagcaggaggacacccgaaaaaagcgaagaggaagaaagacccaccaggaaaagaacggccaagaaagcaagggaccgcacccacaggaggccacacgaagggaaaggaaaacacacaaggaaccagacaagggaggaaaacgaagcaaggaaggacaagggcgcccccacaccgcccaaacagcagacgcagagcaaccggcccggaagaaccagcccacgaagaaaccccacagggaacagcaggaagcccagcaacaagcaacgaaaaaaaaagggaagaaaaaaaaaaaaaaaaaaaccaaacgacaaggcggaagggcacgcggaacagaaagaacacaaagaaacaaccgcagagccaggcaagccagaaccaaaaaccagcgggacccacccaaggaacccaaggcaaaagcccaaaaggaaagaaaaacgaaccccgagcccaaaagcaaagccggaaagaaaccaaacccggagaggaaaaaccagagaaaccccaagaaaaacaacccaaaagaaaagaggagacgggcaacaaaaagcagacaaaaagcacaagggcaggggaccagccaacaagcgaggaaaacacagcaaaaggagacaaagaagaaacaaaaaaagaaagaaaaagaaaggaaaagaaaacagagaaccaccagcaggaaaaaaaagaccaaagcagaagaaagcacagaccggcaagcccaacaaggcaaaaaagcccagccagccaggacagccaggaacgagcacaggagcacaaggcgaagggcccagagggaccagagaaggaagggaaacacaaaaacaagagcaagcaaaacagggaccaaaaagccagagggagacaaagcggggagaagggacgcccccgacgaggccagcacccaccaaaacgagaacggaagaaaaagcagacgcgccgggggcaacccaccagccaccaaggcaaggcacaccaaccgggaacaggccacgaagccggcgcccgaggagcaaggacaagaagcccgccagcaccccccaggggaagacggcaaagaaaaacaagagaacaagacggacaagcaaagaagaaagcaacagcgaccaagaggaagacaccgcaagaggggcagggaagagaagaacaaagcaaaagggagacacaaccgggcagggaagcccggggcagggaagcccggggagcaaacaacaaccccgcagcaacaccaccaccacgggcccaagagaccacaaacagggagggacaaacaagggcaagcaagaccacccaaggagggagggggcgagagaccgagggagagaaaaccagaggcacgagaagagccagacagggaaagagcgagaacaggcggagacagaggggagagaggaaagagggaggggaagaagagagagggcaggcaaaggaggccaagagagagaggacaaaaggaggccaagagagagaggacaaaaaaagaggagagagagagagagagagagagagagagagagagagagagagagagagaggaaaagcaaggaagaaaaagaagcggggaaggagggcagggcagagagagggagggaagagggagaagcccaagaagaaccagggggaacgacgaaacagagacaggcccccgcaaaccaaagcccggagccggcaaaacccaaaaccaggacagaggaagggcccacacagcccccaaacggccccagcaacaggaccagcccaccgagccagcccccagaagcccacccgcccacgcccaggaaacgcacacaaggcgggcacggagggaaacccgggcgacccgcccccccccggggcgcgggacaaagcccaaccacaaggcagacagaagaaacccgaggccaacagcggcaacagcaaagacacacaagaacagacgagggcagagaaaaaacggggagcaggcacaaccacagcaagcagaacagcagagcgagccaagcagaacgggccagaaggggaaagaacaccaagaggagacaagaggaaaaggacagaagaagaacagcagaaggaagaagcgaccccaaaaagaagcagcagacgaaccgacgaagagaagaaagggaggaaaggaagcaccagaccgaggcgagcaagagcaagaacacaaaggaagacaggaacagagaacagccgggcgagaaaccagagagcccaggcacgaaagagacaaaaagggcagcccgacagaaagacagcaacaggaaaaaaaaaaaaacgggcacagcagaggcccgcccaccagggcaacgcaaaacacaacaacgccaagggaagaaaccccagcaaaacaggcgagggccaggaacaacagacaacaccgaaaccaggaccagagaagccagggaaaagcacacaccaacagggccagggccacgaccggcccgggggagagaggagagacgacagacaggcagaacaagacagaaaaaccaaccaccaggaggagaaaaggaaggcaagccacccccgccagcagagaagaagcagaggcagcaagccagaggccgacagagcagccaggccaacccacaaggaaggagaacaaaggaacaaacaagccccgccagggagcacacacgggagacaacaggacagccaaagcgcagaagaaagcaggcagagagaaagccagggagaggcacgaaggcaaaggaaggacagaccacaaagggaggaagcggcaacagacagaccaccagcagcaggaaaacgccaaacacagggcaagcacagggcacggagacaaagggggaagagaagaaaagacgggcgccgccgcccccaagaggaaagaggagaaagnnnnnnnnnnnnnnnnnnnnnnnnnnnnnnnnnnnnnnnnnnnnnnnnnnnnnnnnnnnnnnnnnnnnnnnnnnnnnnnnnnnnnnnnnnnnnnnnnnnncaaaaaaaaaaaaaaaaaaaaaaaaaaaaaaaaaaaaaaaggaaacccggcaccccaaagccaacaccacagagaagcacgcaggaaggagacacggagagcgggacgcaccacaccagaggaccacagcagaagacgggcagagcccaccccacggaggacggacacggaaccgcaagaccccacggagcccggagaagccgagaaaaaggaaaagcacacacagacccacacagaccgagaagcaccggaacagaaaggacaacagaagccaggacacccgagacgcccagcagggcagcagggcgacagacccggaacacagagcgcccagcagacggacccagccacgggcccgcaagcagcaggccaggcccaggacaaaggcaggaggaaaagaggagaccagaga

SEQ ID NO: 820 - RNA, 4170 nt, Mus musculus
  misc_feature (305)..(404): n is a, c, g, or u
  misc_feature (2714)..(3150): n is a, c, g, or u
cacaccacgccaggcaggagggggccaaggaaagaaagaacagagacaaagcagcgaaagggcacaaagaagccaaaggcggccaagacaaacacggagggaccaccagcgaaacaaggcagcaccaccaggggccgagagggcaaaagagacccacccaaacacagggagagcacgcacaggcacgcgacgcacccaggaaacaaaagaagagacgggagaagaaagaccggagaaggccagcccggcagccacggccagccagcagaccccgcgggaacaaagggacgaacgcccaggacccnnnnnnnnnnnnnnnnnnnnnnnnnnnnnnnnnnnnnnnnnnnnnnnnnnnnnnnnnnnnnnnnnnnnnnnnnnnnnnnnnnnnnnnnnnnnnnnnnnnnaagaggagaaggagggcccagggcaagccagccaggcgcaaagccgaggaaggacgggagacgagaggaaacaaacaagaccaaaggcaaccgcacaagcaagcaaggccagccgagcaccgagaccggaaaaaaaaaaaaaagcgggggggggcacaccaacccagcaccgggaggcagaggcaggcggacgagcgaggccagccggcacaaaggagccaggacagccagggcaacagagaaacccgccgaaaaaccaaaaaaaaagaaagaaaaagaaaagaaaaaaaagaaggaagaaagaagaaagacacaagccgcaaaacacaaaagcacgaaagcaagagaggccaggaagcccacacacaaccgaccaagaggcaggaggcgcgggggaagccagacgaacacagccagccaggaccagggcagcagaaacaaagccaccaaaacaaagaggaaggccccccccccaagcccccacaagagagaaacccgcacacaccccgccccccccccccccacaggaggggaccgcaccacccgacagcacaccagcccaggggaagagaaagagaaaggccaacgaggaggcaaacaacagaggagccgggccacagaaagaaaccggcaacgaaaaccaaggccgaaagcaaaaaaaagcaccaggaggggcacacacaggagcccaacacaggaagcgaaggcaggggacccgcaaacgaggccagccggcaacagaacaggccaggacagccagccagggacacagaaaaacccgcgagggaaaacgagacaaaaaaggcaaaacccgcaaacgcccggccccaagcagcccaccgaaaagaccccgaacaagaagcaaaagaaaggcgacgagaaacccgaaagaaacaaacaacccagcaagacccagagaacacaaaacagaaaaacgcaaaagaaagcagcgcaaaaaaaaaaaaaaacggcgaagagaacaacagagccccaggaacgagaagacacgccaaccaacaacgggagcccggagggggcgaaccgaacccgcccaggagaaaagagagaggcgccgggcaaccccacaaccgggaagcacgggcacaacccaggagaggcccgggaggaaaccgacagaaccaagccacacacgcaacaccccaccacaagaaaccgagacagcaaacaaagcaacccagagagaaacaaaaacagccccagcccccccgcccccgccgccgccgccagcggccagccgccccgccggcgccccgcgcggaaaaagcaaaggaaaaaaagagaacaaaaacaagccccccggcaagaaacggagacgccacaagcaaagagaaccagggagcaaaaaaaagacaacgcgaccaaagccggaaagcccgggaaagacccacaggacaccagccacaacagcggccagaaccccgacccagaaaaaccgggaaagggcagcaaacagcgaacacacacaacgaaaaacggaaggcaaagcgacgggaaggagcacacagcgaacgccagagggcgaccaaaaaggcaccagaacaagaccacagcacggggggcaacagacgcagaggaaaaaggaggacagggaacaagaagccggaacacagaacacaggagaccaggacaccacaacaaaggaagcaccccaaaaaaagacaaaaagaagacagggcacaaaagagaagaacaaaaaagcagaacaaaggaggggaaggccgcaaggcgagccaggcgcggccccacaggagccaggcggcaagccacgcaaacccgacccagaccccaggccgggagcaagaggagccaccaaccgacacccgacagagaacaacacaaaaaaaaagaaacggggggggaggcagggggggcacacccagcccagcaccagaaggcagagacagggcgcccagagaaacccgcgaaaacaaacaacaacaacaacaacaacaacaacaacaacaacaaaaacaagagaagcagggggaaccaaaaacaaacaaccaaccaaccaaccaaccagcagcaaaggggaaacggaaaagaaaaggggcaccaaggaggaaagaaagaggaagaaaagcgggggggggggcacaaacccagcaccgggaggagaggcaggcggagagagaggccacccgcacaaaggagccaggacagccagggcacacagagaaacccgccgaaaaacccaaaaaaaaaaaaaaaaaaaaaaaaaaaaaaaaaaaaaaaaaaaagaaagaaaaagaaaaagaaaaaggggaagaaaaagacggggggacaacnnnnnnnnnnnnnnnnnnnnnnnnnnnnnnnnnnnnnnnnnnnnnnnnnnnnnnnnnnnnnnnnnnnnnnnnnnnnnnnnnnnnnnnnnnnnnnnnnnnnnnnnnnnnnnnnnnnnnnnnnnnnnnnnnnnnnnnnnnnnnnnnnnnnnnnnnnnnnnnnnnnnnnnnnnnnnnnnnnnnnnnnnnnnnnnnnnnnnnnnnnnnnnnnnnnnnnnnnnnnnnnnnnnnnnnnnnnnnnnnnnnnnnnnnnnnnnnnnnnnnnnnnnnnnnnnnnnnnnnnnnnnnnnnnnnnnnnnnnnnnnnnnnnnnnnnnnnnnnnnnnnnnnnnnnnnnnnnnnnnnnnnnnnnnnnnnnnnnnnnnnnnnnnnnnnnnnnnnnnnnnnnnnnnnnnnnnnnnnnnnnnnnnnnnnnnnnnnnnnnnnnnnnnnnnnnnnnnnccggacccccacaagaagcaccaagccgcgggaacagaagggcaaagagaagagagcaacacgaacacagacaaaccggggagagcagggggacaagaagcgaaagcggaaccgaacaccagaagggggccccagcacaccagccgaccaccacacagggccaggggacgcagccagccgagaccgcccccaggagaaagaggcgagccgaaacaaacccgaggacagccgaaccacgagccacccacagcccacgcacaaaaagccacaggccaggcacgaggcaggggaaaagaagacaaagacaacaacaaacaggcacacacacaacaacacggcaacagagggccgaacaagaccagaacacaacaaaggagaagaacccagggccagcgaagcaggcgaccacgcccccaacaagcaggcccggagcccacaaggcaccacggccgaaccaaccggccagcagacgggggccaccgccccgaccccaaacagcgggaacccagacccacccaggccagcggagccagagggagagcaagcgagcagagccgaaacgaaacaacaagaaagaaaaaagaaaacaaaaaaaaaaaaagaagggcagagaggccagaaaagcacacaaagggccaaagcagacgccaaggaagagacagaaaagcccaaccagacgcgccagccccagggccacaagaacacgggaaacccaggaccaacaaggagaaaaacagccaaggaccacccgccccacgaggcgcccccccacgggagagagagcgacgcccagagacgagaaggagacgccccccccaggccagagacggcagcaaagaccacaagcgggagcaggaggagaacgagggcgcccacggacgccccagggcgcccacagaccccccaaccggaagcaaagacacacgccggcagccaagcccaaggcaccccgaggcaccagaaaaacacacacggagcaagaggcaaccgaaacccaaacaacaaaagacgccaggacca

SEQ ID NO: 821 - RNA, 6987 nt, Mus musculus
gcccagaaccaaccgagcggaccaggaggcgaccaagggaccagagcccagagcacaaggccagcccccgagaccgaagagcaaagaggggagcagaccccggccccagaggacccacacaagaaaagaggcaaaccaccccgggaccaggacgggcccacccccaaaagcaaaagaaggccgcccgccagcaaagacgagggcccacagagaggcccccccaaaaaagggcccaagagacccagcgccaagagcaccgcccaacagggaggcggagcccaagacgaaagccaaccgacaacaaaaccgcacgccacgcacaccccagggcccggggcggcccccggacccacagaccagaaaaagacaagcccagccgccagggaagggaggacacagggcagggccaacacaagaagaaccaaagacccaggggaggggaagcccagcagaggagagccgacgcgccccaggccaggaaaaggaaccacgccccagacaaagcagccgcaaccacagaggagcaaggaagagaaccggcccccgcccggccccgcacccacccacggccaaaccagccaaaagcggaggcaagaacacgggaacacagcaaaggcaaaacagcacccagagccccaggagagacaaagaggcccaaagccgagggcaaggcagggggcccgaacgccggcagaaagaagaacaaaaagaaccaacccgcccaacagacagcacggaacaacgggccacgaggggaaaccccaggccacgaaggcaaaaaaagggggggaggcgagaaagagaccacacggcaacaacggagaccaccaagaacgagacgaagcccagagacaggcagaggggcaggaccacaccgaccagcccaccggccccagagcgagccccccaggccgaagacagaagggaagggaccgcgcaccccccccccacgggccaaaaaaggacccgcgcacgaagggcgcaagccaggccgagaaaagggccagaccaacgggacagggaaacccccaaacgaaaggccccaaccaggggaggccgacacgcggagcacggacgacccacagacacagggccccggaaaagcccagccgaccaccggaacccaaagaggcacccggcccaaggcgaccaccacgggagacccgcccgcaaaacgggcccacagacaagggagagacggaggggacggcgccgagacacaaacaaacacacccgcccagaggagaccggacaaggacaaagggcagaccacaagccaacagggaacccagagggggaaagaaacaaggagggacacggagggaaagacccaacgacagcagacagaaagcccaccccagcaaggggcaccacaaaagcggagacagagcacacgcacagcccgaaggcggagaggccccagagaccggggcgagccccaggcagccagcggccgcccccaagcgcggggccgcagaggcgcgagaggaccccacagcaaccacacacggggagggaggggccgcgaacccacagcagggacccgaggcagaggcgcccgacccaaacccgagacacccccgaaacaccgccagaagccccaggaagaaagcacaggaagaaaggcgaacaacagaaagggccaaaagcgggccccagggcagaagccagaggacgaggcagcagggcccagcggaccaagaaaaaagaaacgcacgaagccagaggaagcacgaccgccgggagcccccaacaaccgccacggagaggcagagcaaggagcacagaaaacagccacaagaggcacagagccgccgcccccaggcaccgaccgagccacaagaagaggaagggaaggaccagaccgccaaggcgggaaaacagacaagggccagcacagaggccaaggggcacggaccaaaagccacaggcggggcagcgagggagcccacgaagcgggcagaaaaggcaaaaacaagaaagaggaaaggcagcaaagaaaagaagggacccaggcgggcaggggagaggaaccccggaagagggcgggcgggcccagccgccagcgaggcaccaccagaaaagcaggggcccccccaccaccccaccccggaaaccaagagggaaggcaaggagcaaagccaccccccccccaagccagaagaacacccgccagcccccccggggcgagccgggcgggcgcgcccgggaggcgcgaaacaaggcagagggagagcggcaggacacggagaaccgaggccacagggccccagcagaaagggaacgcgggggccccaagcacccaccccccacccacagcagaacgcccagccacgcaaggcacaaagaccacccaggcacacccagagcggggaagacgagcaaagcgcacccgccagcacacgaagcaggaggacaggaaccgggcgggggcacaacagaaaccccccgcggggcagccaaccggcagacagacgaaaacgcagcaaacgacgcagcacccagaggacacaagaagagcccaagggagaacagaaaagcccccaggaggcagacggaaaccccgcacacggccacacaaccgcaccgaaccagcaccgaccccaaacgcccaaagcccgcacggccagaggccaccaccgccccccacaaggcgcagagaacgagcgagcaacccccccccccgccccccagagggaaaagaccagcacgaagccccgagggccccagagcagaaacaaacagcgccggagccagcccccaccgagcagggcaccacacaggccaacagccaccccgggcggacagaaggggcacggcccccacggcgaggagccacaacgaggggacagagcggaaccagcaaacccgagcccgcacggagaccgagggaacaaagccccggcgcccgggggccggccaaaacaccggcgaaaccgaggggggcaaaaagccagccaggccaggagggggaacaggccagccacccggagagccaagggaaaaaagccgggaaaggagaaaagaccaacacgcgggccggagagagcaggccgacaagggaggcacaggggcaacacaagcccgcacccccacggaggaagacggccgccccccaccccccgaggaaagagccggccaggccaagagaccgccagcccaaccgcgaggccggaccgggacacaaaagccgggaccagcccagccccaccaggaagaggaagaccacaaagcacaggagccaggcggcagggggcaacaaccagacaggcagcaagggcacgagcagcacacagagaccaggccacaagccagccagagcacacacccccaccagcccacgaaccagagacaaggaaggagccacggcggcaaaccccacaaagcccccacgaaagccacccgcccccaccccaggaaaaccaaaggccagagaaggcagcaagcgaccagaaaccgaagcaagcagcgggcgacccacgccgacaccgcggcagccacaccccagggagccaggagggcaccggccgggcacaaacaggcacccagaaaccggaaggcccaacgcggggcccagcgcgaggcccgagcacacgccgacaggccccaagaggcacacgaagagcccgagaaagagcagcagggaccacaccaagaaacaccaaaagaccgagaggggcagagaaagccaggcacccaaggccaagcaccaaagaagagggccccgaccccggaagcggccccaaaccaccggcccccacccagggagaaaaaacaccagggggaggacgcaggccaccacaagccgacgcccacaaaaaggcagacacggggggaggcgggggacggagagcggggccggaacaagaaggacacacagccaaacccggaaacgccgagaccacaggagaggagcccgccccgggccgcagcccaggcacaagcccggcccaaccccccagcagaggagacagacccaggagccaggaaacaccccccaagaggcagagacaggaaccccagcaaagagacaccccagcaccgcccagccaagaaaagcaccccccaaaggaaaaaaaggcggccaccaacaaagaaccagccaaaggcccggggggggggggggggggggggggagagaggcgccgagcaccacagccaaccaagacgccagcacacagaaagcccccacacagcccagcccgccaaggggcggcacccgagggagaagcaggggcggcaggaggaggagagcagcccaggcggcgcgaaccaggaacagggacccgcccgccccaagaacgggaccaccagggccacggacgagcacccccgacaaaaggcaggcaccggaaccacccgcagccacacagcagccagcaacgaacgagaggagaaaaccgaccggagggaaaccacaagggcgaagaaaaggagaagagaggaagacgaaggaagagggaaaaaggccgaaccgccacgccccccccacccccacggggcggccagagcgggggaaaaagagaggaaaacagccggccagcgacaggagacagaagaaaagcggaagggaaccagagccaagcccaaacgccagacacgagcagaggggggcaccacgcaaggaaggcaaaagagcagggccaaccaggggcacgacgcgggaggaggaccccacaggggcacaacagagccgcaacagaccacaacaaccaaacagagcaaaacagacgaagagccaacaaaaaagagggggggagggggcaccccaaccgaggaacgacagggcggcagcaccaggaagggagaaccacaccagagcaaaggccgacgcgcccgaaaacagcaagcaccccaggcgaagggacaggccggcagccaaaaaaggacggggccccagcccaccccgggagagggcgcacaggcccgaggaaccaccaaaaagcgcagcacgggacggggcacaaaggccgcagccggggcacgcggaccagccagcacaccaagaagcacagcagacgaaggacccgaggaaggaaaccagaaccgcagccggcagagccacaaagagaaagcacccccccacgaggcagacagcccgcaaaaaaaacaccaccgaccaaacccgcagagagcagccgaaaaggaggacagagcccacggaaccccagacgggaacggaaaaacacagggggggccagcccagcacaaccaaccccggcggacgggaacacccaggcacaccaacccaaacaagaaggaaagaggagacagaaacaccacagaaagaacgcaagagggcagacaaaggagagcagagaaagaggcagaaaggacagacaaagacagaggacagagagaaaagagaggcacaagagagcaacaagggaaagggggcagacaggaaggcagagacagggcaaagagagaacaagcagacacaaggaggacaggagagccagagaagaggagcagaagaacgaaggcaaaagagaggagagagaacccaaacagaacaacagcaaaagccgaaagaagccaggaacagcagcagagaggaggagcagaacagcagagcgacagccagccagagcagaaagagcaggaagggggagccacggaagccagaggggaagggagggaggcagagccaagaagaccaggagcagacgaggcagcaagccccgagacagaacacgagaaaaaaaaaacacgaccgaagggaaagaaaagaaaaccccgaaaggaaccccagcgggaaaagcaaggcaaaaaaggccgggaaggaacagcacggagcgagagaaagaacagacacagaaaacccaggcaagaacgaaaaggcaaaccaacggaacacccaaagagaacaaacagagaggcagacaccagccgacagacaggagcaaggggaagcggggaagcagagagcagagaaccccaaacagcccggggaaagacaaccggggacacgacacagggccacacgagcaagggaaagaagcagcagacccagccagaaccgaagaggcagcaggaaaccgccaccaacggggcgggcggagaacagcagcaacccaccacaagagccgagagccagggcccgaagaagcaaagacaaacccaagcagacagaccagacagacacgacaccgccagaagcaagacaaaaccaagaggcagaccacaaagggcgcacgagggaacagaagagacaacggaagacagcaaagaacaacaacagcaagaggcgggccagacccggaaaaaccggcaggaccagagacccaccacgggggcaagaaaagaaacacacgagcgccagacacaccagaagaggacacagacccgacagaggggagccaggggcgggaagaaccaggacccggaagagcagcaggccaacgcgagccacccagcccccagccaggcgccgacaggcgacaagcccacaccagcacccccccccaaagcacaggcaaacaaaacacagacaagaaaaagggggggggagacgcacagcaaaagcaagaacacgggcaaggcgaaccgggggagcccagcagcgacgcacaccggcaaaaaccgacagaaaaaagaagggagggagagggaagcggcccagggagggggcaaagagggcgcgggagaggggcacggggagagccaagacccccccagcgcggaagcagcccacagagcccagagaagagagaacccagccccgaccggccgcagagcaccagccaccgagaaaggacgaacccgaaccgaagccagccccaaaaaaggccaaagacgcggcagggcgccacagcagaaaacccaacaaaacagaaggaaagggggccccggcagcaggaaaaagagacaggagagcagggcaagggaacaggcagaggaccccacacaaacaagaaggggaaggagagcaaggccagaaccaggggcaggggacggaccgacccccagcagacaccgcagaca

SEQ ID NO: 822 - RNA, 1624 nt, Mus musculus
gaaagaaagaggggaccagaaaacacacacaaccaggaggagccaaagggcaaaaaccacccagggacagcaagaccaagagacccacgcaccacgccaagcagaagaggggaggacggggccccaaagacaggagaagcacagagcacccgacaaaaccaaacccggagaaaacaaccgagcaggggagcgaaagaaacaaggaagcaagcacagggggccccacagacggcgcaccccgcgcagcgaagcacacacccaagcaggaagcgacacacaccccccaagcagggaccccaccgccagccccggaccccggagccaaagccccagcagaaaaggcgaagagacagggggccgagccgcaggaccgagggggggcacggagcgagagcaggcagcgccagagcacgaccacaagccgcaagcagccgcgcaaaggaccccaggacggagcggaaacgcgacagaagcaaaaccaccagagcaccgcagcgagcacccacaaaaaggcaccgggcgagaaaaaaacggagaaagacaacgagaaaaagacaaggcccagaagcaaagaggcacaaaaaacgacaaaagcagagcacacaggcagccacaggcacgccaggcggcggagagccgccgccggccccgcagggacaaccaccacaccgccgagcaaggacggccgcaaaaacacaacaaacccggaagaaaccccagaacacaaagaaaaccgcaccacagaacaaacacaaaaagggaaaacaaaaaaggcacgaccaaacagcgccagagagcaagcgcagagagcaggaggcagggccgacccgagcagccgcccggcgccccaaggccgagggaccgccgggcaccagccgggccagcggaccacaaacaggagggcggagcaaaggaagaacgagggggaggaacaagacgaagaaagacaaagagcgcagaacagggagcaaggcccgagaagaggagcaccgggagccaagagggaagcaggaccaggaagggacccaaccgaggaacgccaagaccaacaaggcagccaccagcagggagagagccccccagccaaaagggaggaacaggcgaacaaaggagggggagaggaggggggaggaacggaaggagagagagagaaaacaaacaagaggacgaggaaaaccaaaaaaaggaaaaaaaaagaaccaacaaaaacaaagaaagagcggagaacgaggaagcaaacacacagaaaaacaaaccccaaaacccaaaagaaaacagccggaaaggagggaagcacaagaagcaaaagagcaagacgggagaccgaaagagaaaacaaacaccacaggccaaaaaaacaaaacaagacagagggaccagcacacacccaggagcaggaacgcagaacacgagcagcccaaaaacaccaaagacggaacacacagcacccaacaccaccacccgcccccaaccgccccgccgaaccccccaaaagaaaacaacaacaaaaaaaaaaaccccaggaagcgcacggcaggggcaagcaaccaggggcaacagaacccccagacacacgcaaaacagaaagaacaggccaaccaaacccaaaggaacacagaaaaga
